(19) United States
(12) Patent Application Publication
(10) Pub. No.: US 2014/0378334 A1
(43) Pub. Date: Dec. 25, 2014

(54) METHOD FOR QUANTIFYING RENAL MARKERS BY ASSAYING URINE

(71) Applicant: ASSISTANCE PUBLIQUE - HOPITAUX DE PARIS (APHP)-, PARIS CEDEX (FR)

(72) Inventors: Pierre Galichon, Paris (FR); Eric Rondeau, Vincennes (FR); Isabelle Brocheriou, Paris (FR); Yi-Chun Xu-Dubois, Paris (FR); Alexandre Hertig, Paris (FR)

(21) Appl. No.: 14/353,262

(22) PCT Filed: Oct. 19, 2012
(86) PCT No.: PCT/EP2012/070821

§ 371 Date: Apr. 21, 2014

(30) Foreign Application Priority Data
Oct. 20, 2011 (FR) 1159485

(51) Int. Cl. C12Q 1/68

(52) U.S. Cl. CPC C12Q 1/6883; C12Q 2600/158
USPC 506/9; 435/6.12; 506/16; 435/6.11

(57) ABSTRACT

The invention pertains to a method of in vitro diagnosis of pathologies in a patient. According to the invention, the method comprises the following steps:
a) obtaining a urine sample from said patient,
b) detecting, in said sample, at least one marker of said pathology and at least one specific marker of the urothelial cells and/or the urothelial microparticles, and
c) determining a threshold of expression of said at least one marker of said pathology by normalization of said marker of said pathology by said at least one specific marker of the urothelial cells and/or the urothelial microparticles.

### 1. FIELD OF THE INVENTION

[0001] The field of the invention is that of uronephrology. More specifically, the invention pertains to a method of in vitro diagnosis of pathologies of the urinary system.

### 2. PRIOR ART

[0002] Kidney diseases can affect the different structural compartments of the kidney: the vessels, the glomeruli, the tubules or the interstitium. These disorders lead to acute and/or chronic kidney failure, their ultimate development being the total destruction of the functional units of the kidney which are replaced by an expansion of the extra-cellular matrix, i.e. renal fibrosis. These kidney diseases have various corresponding etiologies: obstruction of the excretory tracts, inflammation, auto-immunity, allergy, deposition diseases, hypertension, diabetes, vasculopathies, ischemia, toxicity, etc. Kidney diseases can affect native kidneys or allotransplants after a kidney transplant. In France, it is estimated that there are 3,000 new cases of transplants (kidney, heart, liver, bone marrow, lungs, etc) every year. The systematic follow-up of patients having received transplants has enabled the study of the early stages of renal diseases evolving towards fibrosis. The expression in the renal tissue of epithelial-mesenchymal transition (EMT) markers enables early detection of a fibrosing disease in the renal tissues, which can be caused by ischemia, the rejection or toxicity of immunosuppressants, especially cyclosporin A (CsA) (Slattery et al, Am J Pathol. 2005 August; 167(2): 395-407; Hertig et al, American Journal of Transplantation 2006, Galichon et al, Fibrogenesis Tissue Repair 2011; Galichon et al, Transplantation, 2011).

[0003] EMT is a dynamic process during which the cells lose their epithelial characteristics and acquire mesenchymal characteristics. These modifications affect the morphology of the cell as well as its working. When EMT reaches the renal tubular cells, it progresses towards fibrosis and chronic renal failure (Hertig et al, J Am Soc Nephrol 2008). It is therefore necessary to monitor the appearance of this phenomenon among patients who have undergone transplants in order to adapt or modify the immunosuppressant treatment.

[0004] At present, the reference method implemented for the detection and monitoring of any renal pathology is biopsy. Biopsy consists in removing a core of tissue from the kidney by transcutaneous, transvenous or surgical means. This sample is then subjected to a histological examination to detect possible signs of pathology (destruction, cell infiltration or hypertrophy of the glomerular, tubular, vascular or interstitial compartments).

[0005] This method however has numerous drawbacks. Taking samples is not without risks for the patient. Many complications have been observed such as hematuria, obstructive renal failure and even anuria, hematoma in the perirenal region, the appearance of arterial and venous fistulas and more rarely hemorrhage, loss of transplant, and death. Apart from the risks related to any invasive procedure, it can happen that the biopsies are performed in a region that does not represent the overall condition of the kidney and that, therefore, the patient's true situation is under-estimated or over-estimated because of this sampling procedure.

[0006] In addition, since biopsies cannot be done systematically at short intervals, this method does not enable early detection of the appearance of a pathology either. Besides, performing a renal biopsy is costly, complex, invasive and painful for the patient.

[0007] It is therefore necessary to find a non-invasive, simple, economical, reliable method of diagnosis that enables early detection and entails the least possible risk for the patient.

### 3. GOALS OF THE INVENTION

[0008] The invention is aimed at overcoming these drawbacks of the prior art.

[0009] More specifically, it is a goal of the invention, in at least one embodiment, to provide a method of early diagnosis of renal pathologies or of pathologies having renal repercussions.

[0010] It is another goal of the invention, in at least one embodiment, to implement a method of non-invasive diagnosis.

[0011] It is yet another goal of the invention, in at least one embodiment, to implement a reliable and precise method of diagnosis.

[0012] It is another goal of the invention, in at least one embodiment of the invention, to implement a method of diagnosis that is simple to perform.

[0013] It is another goal of the invention, in at least one embodiment, to implement a more economical method of diagnosis.

[0014] It is another goal of the invention, in at least one embodiment, to implement a method for following up the efficacy and tolerance of a treatment.

[0015] Finally, it is another goal of the invention, in at least one embodiment, to implement a method of diagnosis that is less costly for the patient.

### 4. SUMMARY OF THE INVENTION

[0016] These goals as well as others that shall appear here below are achieved entirely or at least partly by means of a method of in vitro diagnosis of pathologies in a patient.

[0017] According to the invention, such a method comprises the following steps:
[0018] a) obtaining a urine sample from said patient,
[0019] b) detecting, in said sample, at least one marker of said pathology and at least one specific marker of the urothelial cells and/or the urothelial microparticles, and
[0020] c) determining a threshold of expression of said at least one marker of said pathology by normalization of said marker of said pathology by said at least one specific marker of the urothelial cells and/or the urothelial microparticles.

[0021] Thus, the invention relies on the use of cells and microparticles contained in the urine in order to extract therefrom the genetic material and to compare the expression of a gene of interest, correlated with a pathology, with the expression of a specific gene of the urine cells unaffected by the pathology.

[0022] Urine indeed contains a small quantity of urothelial cells arising out of the normal renewal of the epithelium of the urinary excretory tracts. It can also contain quantities, variable depending especially on the presence of a renal pathology, of leukocytes, renal tubular or glomerular cells, blood as well as microparticles.

[0023] The term “microparticles” is understood to mean complex vesicular structures that can be released by most cells during the activation process or apoptosis. They are formed by a bilayer membrane of phospholipids exposing transmembrane proteins and receptors, and they enclose cytosolic constituents such as enzymes, transcription factors and mRNA coming from their mother cells.

[0024] The term “urothelial cells” is understood to mean transitional epithelial cells forming the human urothelium, from the pelvis up to the urethra. These cells have various shapes: cylindrical, kite-shaped, umbrella-shaped and balloon-shaped.

[0025] The term “specific marker of urothelial cells” is understood to mean a gene specifically expressed by the urothelial cells or urothelial microparticles, whether it is within the cells or on the surface, the level of synthesis of this gene by said cell being independent of the pathologies that can effect the renal cells. This notion is therefore different from the notion of a housekeeping gene, the expression of which is ubiquitous whatever the cell type, the function of the cell or its state.

[0026] Although this is rare, it is possible using current-day methods of molecular biology or biochemistry to extract nucleic acids and proteins from the cell and the microparticles contained in the patient's urine. In order to eliminate the bias related to the quantity of cells and microparticles in the sample, it is common practice to express the expression of the gene of interest as a function of the expression of a housekeeping gene such as GAPDH (glyceraldehyde 3 phosphate dehydrogenase) genes, 18S ribosomal RNA, the cyclophilin A or B, the β-catenin or again HPRT (hypoxanthine-guanine phosphoribosyltransferase) (Absolute quantification of mRNA using real-time reverse transcription polymerase chain reaction, S. A. Bustin, Journal of Molecular Endocrinology, 2000, 25, 169-193).

[0027] However, this method does not take account of the cellular specificity of the pathology. Thus, the modification of the expression of a gene linked to a pathology affecting a precise cell type can be masked by the fact that the housekeeping gene coming from other cell types present in the urine is strongly expressed.

[0028] One of the contributions of the invention is therefore that it normalizes the expression of the gene of interest by the expression of a gene independent of the cell types affected. This step of normalization is used to determine a threshold of expression of the pathological marker by means of a urine marker independent of the quantitative and qualitative variations of the urine cells of renal origin. It is then possible to know whether this marker is expressed strongly or, on the contrary, weakly. This characteristic makes it possible to obtain a diagnostic test that is reliable, precise and reflects the patient's state of health with greater exactness. Thus, the method according to the invention can be used for diagnostic purposes to monitor the progress of a pathology.

[0029] In addition, working from a urine sample has many advantages:
[0030] the sample is easy to access;
[0031] collecting the sample is non-invasive and painless;
[0032] collecting the sample is economical.

[0033] The simplicity of this method also makes it possible to implement it in all types of laboratories without making use of special technical qualifications or equipment other than that commonly used. The absence of any particular investment for implementing this method thus reduces the costs of analysis.

[0034] Finally, this method of normalization can be applied to different pathologies, renal or non-renal, provided that these pathologies modify the expression and/or quantity of urothelial cells and/or microparticles excreted and present in the urine.

[0035] The invention furthermore pertains to a method of in vitro diagnosis in which the step b) comprises the detection of the product of transcription of said at least one specific marker of the urothelial cells and/or urothelial microparticles and of the product of transcription of said at least one marker of said pathology.

[0036] The study of the products of transcription is more reliable than the study of the presence of a gene in the genome of the cell. It is indeed well known that the presence of a gene in the genome of a cell cannot necessarily be correlated with its expression in said cell, since the regulation of the expression of a particular gene is subject to numerous parameters. The detection of the product of transcription therefore makes it possible to obtain a more precise and more reliable result.

[0037] Another object of the invention is a method in which the step b) is implemented by means of a technique of amplification of nucleic acids chosen from the group comprising RT-PCR, quantitative PCR, final-point PCR, semi-quantitative PCR or their combination.

[0038] The term PCR (Polymerase Chain Reaction) is understood to mean the technique in which a fragment of target DNA is replicated in vitro in numerous copies. The term RT-PCR (Reverse Transcriptase Polymerase Chain Reaction) is understood to mean in vitro synthesis of a complementary DNA from extracted messenger RNAs. The term “quantitative PCR”, also known as real-time PCR, is understood to mean the technique of in vitro replication of a fragment of target DNA additionally enabling measurement of the initial quantity of this target fragment. Semi-quantitative PCR can be distinguished from quantitative PCR in that the PCR is interrupted at several points enabling the initial quantity of DNA to be evaluated. This type of PCR is useful when the quantity of DNA is unusually low. Final-point PCR associates the Northern Blot technique with classic PCR in order to evaluate the initial quantity of DNA by comparison of the bands on agarose gel.

[0039] These methods, which cost little to implement, have the advantage of giving a fast and reliable result compatible with the requirements of a diagnostic test.

[0040] The invention furthermore pertains to a method of in vitro diagnosis in which the step b) is implemented using a nucleic acid hybridization technique chosen from the group comprising in situ hybridization (ISH), fluorescence in situ hybridization (FISH) or hybridization with marking by fluorescence (FISH), biochip hybridization, the Northern Blot method or the Southern Blot method.

[0041] The invention also pertains to a method of in vitro diagnosis in which the step b) is implemented through a method of sequencing of the nucleic acids.

[0042] Yet another object of the invention is a method of in vitro diagnosis in which the pathology is a renal pathology chosen from the group comprising renal fibrosis, a phenotypic change of the renal epithelial cells, a transplant rejection, a cancer, the glomerular diseases (diabetes, extramembranous glomerulonephritis, minimal glomerular lesions, segmentary and focal hyalinosis, etc), the tubular diseases (acute tubular necrosis, expression of epithelial-to-mesenchymal transition markers, atrophy, cellular rejection, obstruction of the excretory tracts, etc), the interstitial diseases (inflammation, fibrosis) and the vascular kidney diseases (arterial hypertension, thrombotic microangiopathy, humoral rejection, etc).

[0043] The term “epithelial-mesenchymal transition” (EMT) refers to a biological process that enables a polarized epithelial cell, interacting normally with the basal membrane, to undertake numerous biochemical transformations that enable it to acquire a mesenchymal cell phenotype, including increased migratory capacity, an invasive character, increased resistance to apoptosis and massive increase in the components of the extra-cellular matrix (Kalluri R, Weinberg R A, “The basics of epithelial-to-mesenchymal transition”, J Clin Invest. 119 (2009) 1420-1428). The epithelial phenotypic changes are the EMT markers (for example vimentin and R-catenin in the tubular epithelium) that can be studied in the tissues in a clinical situation (Hertig A. et al.n “Early epithelial phenotypic changes predict graft fibrosis”, J Am Soc Nephrol. 19 (2008) 1584-1591).

[0044] Another object of the invention is a method during which said patient has received an organ transplant and said renal pathology is the presence of an interstitial fibrosis, a tubular atrophy or epithelial-mesenchymal transition in the renal transplant.

[0045] The method according to the invention therefore enables the efficient and early detection of the emergence of a renal pathology such as inflammation or EMT-inducing epithelial phenotypic changes in the kidney.

[0046] Yet another object of the invention is a method of in vitro diagnosis in which at least one specific genetic marker of said renal pathology is chosen from the group comprising the human genes CD45 (SEQ ID 1), CD68 (SEQ ID 2), and VIM (SEQ ID 3) as well as the genes having a sequence homology of at least 80%, preferably at least 85%, preferably at least 90%, preferably at least 95%, preferably at least 99% with these human genes.

[0047] By way of a precise indication, the human gene CD45 is also symbolized as PTPRC (Protein Tyrosine Phosphatase Receptor type C). In the following description, the human gene CD45 or PTRPC will be designated equally by the symbol CD45 or PTPRC.

[0048] The inventors have surprisingly discovered that the expression of these genes is considerably increased in the urine of patients having undergone clinically stable kidney transplants but for which, however, the biopsy of the transplant reveals the presence of epithelial phenotypic changes. This over-expression can be correlated with the presence of epithelial phenotypic changes arising during an epithelial-mesenchymal transition and tubular-interstitial diseases in the biopsies of renal allotransplants, these biopsies being performed in the context of a systematic screening three months after the transplant. It is possible, as understood in the invention, to search for the expression of only one gene, which is a specific marker of a pathology. However, in order to refine the diagnosis, it is preferable to search for a combination of different genes, the expression of which in urine takes account of the presence of a particular renal pathology. For example, we can cite research of the expression of CD45, or PTPRC, and CD68 genes, normalized by uroplakin to detect the presence of inflammatory cells in the transplant. It is also possible to search for the expression of certain tumor markers. Examples that can be cited are markers for clear-cell carcinoma, the search for racemase, caveolin-1 (SEQ ID 29), ROR1 (SEQ ID 30), CD10 (SEQ ID 31), keratin 7, vimentin (SEQ ID 3), TP53 (SEQ ID 26) in the context of monitoring a renal cancer.

[0049] A “homologous sequence” or a “sequence homology” between nucleotide sequences is determined by linear comparison of the nucleotide sequences using the software BLAST (Basic Local Alignment Search Tool), using the algorithm blastn available on the NCBI site: (http://blast.ncbi.nlm.nih.gov/Blast.cgi?PROGRAM=blastn&BLAST_PROGRAMS=megaBlast&PAGE_TYPE=BlastSearch&SHOW_DEFAULTS=on&LINK_LOC=blasthome).

[0050] The parameters chosen for this analysis are the following:
[0051] database: human genomic plus transcript (Human G+T);
[0052] no exclusion of models or samples of environmental sequences;
[0053] optimizing of the program: blastn (somewhat similar sequences);
[0054] short queries=automatically adjusted parameters for input sequence;
[0055] expect threshold=10;
[0056] word size=11;
[0057] max match in a query range=0.

[0058] With respect to the scoring parameters, these parameters are fixed by default (match/mismatch scores=2-3; gap costs=existence: 5, extension: 2). Finally, no filter is applied.

[0059] According to another advantageous embodiment, said pathology is a pathology modifying the quantity of cells and/or microparticles excreted in the urine.

[0060] Preferably, said pathology modifying the quantity of cells and/or microparticles excreted in the urine is chosen from the group comprising glomerular diseases such as segmentary and focal hyalinosis, tubular diseases such as acute tubular necrosis, epithelial phenotypic changes, cell rejection and interstitial diseases such as acute transplant rejection, Sjögren's syndrome and sarcoidosis.

[0061] Thus, the method according to the invention enables the reliable, speedy and non-invasive detection of the development of non-renal diseases through the collection of urine samples from the patient, when the pathologies modify the profile of gene expression and/or the quantity of cells excreted in the urine.

[0062] Tubular necrosis takes the form of an increase in the number of tubular cells in the urine due to a major desquamation of the walls of the renal tubular epithelium. Segmentary or focal hyalinosis is accompanied by a major quantity of podocytes in the urine. The increase in the number of leukocytes is a sign of acute rejection of a transplant.

[0063] Advantageously, said at least one specific marker of urothelial cells is chosen from the group comprising the human genes uroplakin 1A (SEQ ID 4), uroplakin 1B (SEQ ID 5), uroplakin 2 (SEQ ID 6), uroplakin 3A (SEQ ID 7), uroplakin 3B (SEQ ID 8), uroplakin 3BL (SEQ ID 9), Bcas1 (SEQ ID 10), CEP152 (SEQ ID 11), CRABP2 (SEQ ID 12), DNASE1 (SEQ ID 13), KRT20 (SEQ ID 14), PLEKHF1 (SEQ ID 15), PLEKHG4B (SEQ ID 16), RCN1 (SEQ ID 17), SEMA5B (SEQ ID 18), SULT2A1 (SEQ ID 19), TFF1 (SEQ ID 20), VILL (SEQ ID 21), ZNF720 (SEQ ID 22) as well as genes having sequence homology of at least 80%, preferably at least 85%, preferably at least 90%, preferably at least 95%, preferably at least 99% with these genes.

[0064] Among the cells present in the urine, only the urothelial cells express these genes. These genes are specifically and constantly expressed by the urothelial cells and/or microparticles, independently of the renal pathologies. Naturally, these genes are present in the genetic material contained in the nucleus of each cell of the organism. However, the genes are not expressed in the same way by all the cells of the organism. In other words, not all the genes are transcribed from DNA to mRNA and then translated from mRNA into protein in all the cells forming the human body. However, the inventors have discovered that, among the cells and microparticles contained in urine, these genes are specifically expressed by the urothelial cells and that that they are so expressed constantly. They therefore constitute referentials of choice for normalizing genes linked to a pathology specifically affecting the renal cells or modifying their quantity in the urine. The inventors wish to emphasize that the above-mentioned genes can in fact be detected in other cell types, for example when this detection is based on a simple search for the presence of a gene in the total DNA and not in the genes expressed by a cell type. These genes can also be expressed by other types of cells. However, their interest in the present invention is related to the fact that, among all the cell types that can be found is a patient's urine sample, only the urothelial cells express these genes, independently of pathological conditions. Consequently, as understood in the invention, the notion of a specific marker of the urothelial cells or of the urothelial microparticles must be distinguished from the notion of a housekeepinghousekeeping gene. Indeed, housekeepinghousekeeping genes are genes expressed by all the cells whatever their cell type and their function. On the contrary, the term “specific marker of the urothelial cells” corresponds to genes expressed solely by the urothelial cells among all the cells that can be found in a urine sample.

[0065] Besides, these genes have been identified by the inventor as genes that can be used to obtain an excellent statistical correlation (p value<0.01) relative to this method of normalization by the housekeeping genes (18S RNA, GAPDH, etc). The p value obtained for each gene is indicated in Table 1 below.

TABLE 1
Specific markers of the urothelial cells

| Name of the gene | p-value |
|---|---|
| UPK1A | 1.37 · 10⁻⁴⁰ |
| UPK1B | 1.40 · 10⁻¹² |
| UPK2 | 2.11 · 10⁻¹² |
| UPK3A | 4.04 · 10⁻⁹ |
| Bcas1 | 4 · 10⁻⁵ |
| PLEKHF1 | 2.17 · 10⁻⁵ |
| KRT20 | 3.05 · 10⁻⁵ |
| ZNF720 | 7.80 · 10⁻⁵ |
| UPK3B | 1.74 · 10⁻⁴ |
| RCN1 | 1.97 · 10⁻⁴ |
| TFF1 | 2.54 · 10⁻⁴ |

Preferably, said at least one specific marker of the urothelial cells or of the urothelial microparticles is chosen from the group of genes comprising the human genes UPK1A, UPK1B, UPK2 and UPK3A as well as the genes having a sequence homology of at least 80%, preferably at least 85%, preferably at least 90%, preferably at least 95%, preferably at least 99% with these genes.

[0066] The term “normalization” is understood to mean the elimination of biases related to errors of measurement or manipulation and independent of the biological variations. The step of normalization therefore enables the production of more reliable results. Normalizing by using specific genes of the cells affected by the pathology being sought eliminates the bias related to the proportion of these same cells in the urine sample. Indeed, the quantitative and qualitative composition of urine is not fixed either because of the rate of flow of urine or because of the disease. The risk of wrongly estimating the true progress of the pathology in the patient is therefore real and could prove to be detrimental to his therapeutic treatment.

[0067] For example, when the quantitative PCR technique was used, the normalization consisted of a passage from the logarithmic scale (corresponding to the raw result) to a linear scale in two steps:

Cp_{specific marker of urothelial cells}−Cp_{pathological marker}=ΔCₚ, (1)

the Cp, or crossing point, being the number of cycles of amplification before detection of the fluorescent signal by the apparatus.

Level of expression of the normalized pathological marker=2^{ΔCp} (2)

[0068] When a migration on gel is implemented to display results as is the case for the classic PCR followed by migration on agarose gel or for the Northern and Southern Blot techniques, the operator must measure the optical densities of each migration band with any usual software (Image J™, UN-SCAN-IT Gel™) and make a report of it to determine the threshold of expression of the gene of interest in the patient. The threshold of expression is then computed as follows:

Level of expression of the normalized pathological marker=optical density of pathological marker/optical density of urothelial cell marker

[0069] Another object of the invention is a method of in vitro diagnosis further comprising a step for comparing the threshold of expression of said marker of a renal pathology with a threshold of expression unchanged by the disease.

[0070] The comparison with a healthy patient makes it possible to note the positive or negative influence of a pathology on the regulation of the expression of a normally expressed gene. It is done as follows:

Regulation of a gene=2^{(ΔCp patient-ΔCp healthy individual)}

[0071] Apart from the comparison with a healthy patient, it is possible to monitor the progress of a transplant or a pathological state through the method of the invention. It is indeed possible to keep the previous results of a patient and to use them as a referential. This internal normalization eliminates the bias due to the differences between individuals. It also enables the medical follow-up of the patient and the monitoring of his illness or of the transplant.

[0072] The invention further comprises an in vitro diagnostic kit for the detection of pathologies from a urine sample coming from a patient, the kit comprising at least one pair of primers for the detection, in said sample, of at least one specific marker of a pathology and at least one pair of primers for the detection, in said sample, of at least one specific marker of the urothelial cells.

[0073] Advantageously, said pathology is a renal fibrosis or a phenotypic change of the renal epithelial cells, and said at least one specific marker of a renal pathology is chosen from the group comprising the human genes CD45, CD68 and VIM.

[0074] In a preferred embodiment, said at least one specific marker of urothelial cells is chosen from the group comprising the human genes uroplakin 1A, uroplakin 1B, uroplakin 2, uroplakin 3A, uroplakin 3B, uroplakin 3BL, Bcas1, CEP152, CRABP2, DNASE1, KRT20, PLEKHF1, PLEKHG4B, RCN1, SEMA5B, SULT2A1, TFF1, VILL, ZNF720 as well as genes having a sequence homology of at least at least 80%, preferably at least 85%, preferably at least 90%, preferably at least 95%, preferably at least 99% with these human genes.

[0075] Another object of the invention lies in the use of the in vitro diagnostic kit for the detection of a renal pathology, said renal pathology being a fibrosis or a phenotypic change of the renal epithelial cells.

### 5. LIST OF FIGURES

[0076] Other features and advantages of the invention shall appear more clearly from the following description of a preferred embodiment, given by way of a simple illustratory and non-exhaustive example and from the appended drawings, of which:

[0077] FIG. 1 is a graph showing the correlation of the EMT scores with the result of the urine PCR for vimentin (VIM) normalized by GAPDH.

[0078] FIG. 2 illustrates the correlation of the same EMT scores with the same results of urine PCR for vimentin (VIM) when the results are normalized by the uroplakin 1A gene UPK1A.

[0079] FIG. 3 is a graph representing the correlation of the EMT scores with the results of the urine PCR for CD68 normalized by GAPDH.

[0080] FIG. 4 shows the correlation of the same EMT scores with the same results of urine PCR for CD68 when these results are normalized by the uroplakin 1A gene UPK1A.

[0081] FIG. 5 represents the correlation of the EMT scores with the results of the urine PCR of CD45 normalized by GAPDH.

[0082] FIG. 6 represents the correlation of the same EMT scores with the same results of urine PCR for CD45 when these results are normalized by the uroplakin 1A gene UPK1A.

[0083] FIG. 7 is a graph representing the number of identified genes corresponding to the terms “kidney” and “the inter-cell junction” according to the method of the invention.

[0084] FIG. 8 is a graph representing the significance of gene enrichment with respect to the term “kidney” and the term “inter-cell junction” according to the method of normalization.

### 6. DESCRIPTION OF ONE EMBODIMENT OF THE INVENTION

[0085] The general principle of the invention relies on the comparison of the expression of a gene correlated with a pathological phenomenon, designated as a marker of a pathology or pathological marker, with the expression of a reference gene, the level of expression of which in the urothelial cells is independent of the cells affected by the pathology. This marker is designated as a specific marker of the urothelial cells.

### EXAMPLE 1

### Diagnosis of the Epithelial Phenotypic Changes of the Renal Transplant through the Method of the Invention

[0086] In order to evaluate the sensitivity of the diagnostic method according to the invention, renal biopsies are carried out on patients who have undergone an organ transplant and have been treated with CsA. At the same time, a sample of their urine is collected. In these samples, a search is made by quantitative PCR for markers associated with a phenotypic change of the renal epithelial cells. In order to demonstrate the superiority of the method according to the invention, the results of quantitative PCR are normalized according to a urothelial reference gene, in compliance with the method according to the invention, and according to a housekeepinghousekeeping gene, in compliance with the classic method described in the literature.

[0087] Control biopsies on transplant patients are analyzed by the Anatomopathology Laboratory of the Hôpital Tenon (Paris). A search is made for the protein expression of vimentin and β-catenin, which are EMT markers, according to methods of immunohistochemistry well known to those skilled in the art. The EMT score is determined as a function of the percentage of renal tubules expressing the EMT markers, i.e. vimentin and β-catenin (Hertig et al, American Journal of Transplantation 2006). These scores are expressed as follows:
[0088] score=0: no EMT;
[0089] score=1: <10% of the renal tubules in the biopsy present EMT markers;
[0090] score=2: 10-24% of the renal tubules in the biopsy present EMT markers;
[0091] score=3: 25-50% of the renal tubules in the biopsy present EMT markers;
[0092] score=4: >50% of the renal tubules in the biopsy present EMT markers.

[0093] The patient is considered to be positive for EMT when the score is greater than or equal to 2.

[0094] 1. Collection of Urine and Preparation of Cellular Lysate

[0095] 50 ml of fresh urine is collected from these patients in a Falcon® tube. The collection is done during the three weeks preceding the biopsy in order to prevent the presence of red blood cells in the urine. The selected patients have no trace of urinary infection, and have not had any residual diuresis before the transplant. The day's first miction is not used.

[0096] The urine sample is centrifuged at 2000 rpm for 20 minutes, at ambient or room temperature (T_{amb}). A volume of 2 ml of supernatant is stored at −80° C. The rest of the supernatant is discarded. The cell pellet containing cells and minerals is taken into a volume of 15 ml of buffer solution PBS1×. The cell suspension is again centrifuged to remove debris for 10 minutes at 2000 rpm, at T_{amb}. The supernatant is discarded, the pellet is drained by the overturning of the tube and then re-suspended in 150 μl of lysis buffer RLT, supplemented with 1% by volume of β-mercaptoethanol (14.3 M solution). The buffer RLT is provided by the Qiagen laboratories in the RNeasy® Micro Kit. At this step, the lysate thus obtained can be kept at −80° C. or directly used to extract RNA.

[0097] 2. Extraction of RNA

[0098] The RNA messengers (mRNA) are extracted from the cells present in the urine sample. The markers indicating pathology, fibrosis or EMT are generally expressed only when these phenomena appear. To study their transcription is therefore more relevant than to look for their presence in the genome.

[0099] The RNA is extracted from the cellular lysate, prepared as described here above, using the RNeasy® Micro Kit (Qiagen) according to the protocol provided by the manufacturer. More specifically, the protocol followed is the protocol “Tissues obtained by micro-dissection”. Briefly, a volume of 70% sterile ethanol is added to the homogenized lysate according to the indications of the protocol. The lysate is deposited entirely or partly in a RNeasy® column provided with the kit. The columns are centrifuged for 15 seconds at a rotational speed of over 10,000 rpm at 4° C. The flow-through is discarded. The column is washed with buffer RW1 provided with the kit. The RNA is eluted and then recovered in 14 μl of water without RNAse.

[0100] 3. Complementary DNA Synthesis

[0101] The reverse transcription of the RNA extracted here above is achieved by means of the QuantiTect® Reverse Transcription kit (Qiagen). Briefly, the RNA solution produced previously is added to the gDNA Wipeout Buffer provided with the kit and then incubated at 42° C., for 2 minutes. This step eliminates the residual genomic DNA. The reverse transcription mix (RT Primer Mix) contains nucleic bases, reverse transcriptase (Quantiscript® Reverse Transcriptase) and the reaction buffer (Quantiscript® RT Buffer). It is added to the RNA solution. The mixture is incubated for 15 minutes at 42° C., so that reverse transcription is achieved. The mixture is then incubated for 3 minutes at 95° C., in order to deactivate the reverse transcriptase. The solution of complementary DNA thus ready can be preserved or diluted to 1/10^{th} before analysis.

[0102] 4. Quantitative PCR

[0103] Quantitative PCR is used to evaluate the initial quantity of transcription products in the cells. It therefore makes it possible to determine whether a gene is over-regulated or under-regulated.

[0104] Briefly, a reaction mixture is prepared containing:
[0105] 5 μl of SYBR® Green Master Mix 2×(Roche Laboratories)/well,
[0106] 0.25 μl of each primer at 10 μM (Roche Laboratories)/well,
[0107] 1.5 μl of sterile water/well.
   7 μl of this reaction mixture is deposited per well in a 96-well plate (Roche Laboratories). 3 μl of complementary DNA from each patient, diluted to 1/10^{th}, is added to each well. The plate is then centrifuged at 1500 g for 2 minutes and then introduced into the LightCycler 480 automaton (Roche Laboratories) for amplification.

[0108] The pairs of primers used are provided by the Roche Laboratories:

TABLE 2
Sequences of pairs of primers of human genes
vimentin, CD45 (or PTPRC), GAPDH
and uroplakin 1A

| | Sense | Anti-sense |
|---|---|---|
| Gene | primer | primer |
| VIM | gaccagctaac | gaagcatctc |
| | caacgacaaa | ctcctgcaat |
| CD45 | agttattgttatgc | tgctttccttc |
| | tgacagaactgaa | tccccagta |
| CD68 | gtccacctcgac | cactggggcagg |
| | ctgctct | agaaact |
| Uroplakin | ggtagccagttt | agcatgagcac |
| 1A (UPK1A) | tggtgtgg | caggtacg |
| GAPDH | agccacatcgc | gcccaatacga |
| | tcagacac | ccaaatcc |

[0109] Vimentin is a protein belonging to the family of intermediate filaments. Its gene symbol is VIM. It takes part in the cytoskeleton. CD45 or PTPRC is a transmembrane protein tyrosine phosphatase normally expressed by the leukocytes. CD68 is a glycoprotein normally expressed by macrophages and monocytes.

[0110] The genes of vimentin (VIM), CD68 and CD45 (PTPRC), in this case our genes of interest, seem to be particularly over-expressed in the renal tubules and/or renal interstitium during fibrosing diseases of the transplant, which are manifested also in immunohistochemistry by the presence of EMT in renal biopsies. The GAPDH gene is used as a reference housekeeping gene, and is expressed in all types of nucleated cells without distinction. The uroplakin 1A gene is used as a reference gene specific to the urothelial cells.

[0111] The following is the amplification program:
[0112] 1 pre-incubation cycle (5 minutes at 95° C.)
[0113] 45 amplification cycles (15 seconds at 60° C.; 15 seconds at 72° C.)
[0114] 1 fusion curve (5 seconds at 96° C., 1 minute at 60° C., then slow heating from 0.06° C./s to reach 96° C. with 10 acquisitions/° C.).
[0115] 1 cooling cycle (30 seconds at 40° C.).

[0116] The plate containing amplified DNA is withdrawn from the automaton and then preserved at 4° C. The raw data are retrieved from the automaton for normalization.

[0117] 5. Normalization

[0118] The raw data are normalized according to the reference method used to compute the initial quantity of DNA during a quantitative PCR. Briefly, the results of each patient were normalized and then linearized as follows:
[0119] relative to a housekeepinghousekeeping gene (GAPDH):

Cp_{GAPDH}−Cp_{gene of interest}=ΔCp,

Gene of interest/GAPDH=2 ^{ΔCp}
[0120] relative to uroplakin, which is the specific marker of the urothelial cells:

Cp_{UPK}−Cp_{gene of interest}=ΔCp,

Gene of interest/uroplakin=2^{ΔCp}

[0121] Cp being the number of amplification cycles before detection of the fluorescent signal by the apparatus.

[0122] 6. Results

[0123] FIGS. 1 and 2 present the correlation of the results of the quantitative PCR on the vimentin gene in correlation with the EMT scores. In FIG. 1, the correlation coefficient R² is very low and the slope of the regression line is zero. It is therefore impossible to conclusively relate the expression of vimentin to the presence of epithelial phenotypic change in the renal cells. However, the normalization of the results by the uroplakin in compliance with the method of the invention significantly improves the regression coefficient. Furthermore, the slope of the regression line becomes positive, thus clearly and unequivocally correlating the expression of the vimentin gene with increasingly higher EMT scores. These results are therefore consistent with the results of biopsies.

[0124] Similarly, according to FIG. 3, the slope of the regression line relating the expression of CD68 with the presence of EMT is very low. This would mean that the expression of CD68 is not correlated with the appearance of epithelial phenotypic changes in the kidney. Now, the expression of CD68 is positively regulated in renal fibrosing diseases (Anders et al, Kidney Int., 2011). It is therefore clear that the classic method of normalization by a housekeeping gene leads to false negatives.

[0125] On the contrary, FIG. 4 shows that normalization by uroplakin considerably improves the test. The slope of the regression straight line becomes positive and the expression of CD68 is positively regulated during the phenomena of epithelial phenotypic changes. The result is in accordance with the anatomopathological examination on the control biopsies.

[0126] With respect to the expression of CD45 (PTPRC), the over-expression of CD45 (PTPRC) in the renal tissue is associated with an unfavorable development of the kidney allotransplants (Scherer et al, Nephrol Dial. Transplant., 2009). The comparison of FIGS. 5 and 6 shows that the PCR test using urine is considerably improved when the normalization is done by uroplakin.

[0127] In conclusion, the normalization of the results relative to GAPDH does not enable any efficient discrimination between patients showing EMT and “healthy” patients, and this is the case whatever the gene of interest studied. As indicated by the slopes, respectively zero and negative, of the regression lines of FIGS. 1 and 3, the normalization by the GAPDH housekeeping gene leads to false negatives. The clinical specialist therefore cannot rely on the results of this type of analysis. Resorting to a confirmation biopsy therefore remains inevitable.

[0128] The test is considerably improved when uroplakin is used as the reference gene for normalizing the results. According to FIGS. 2, 4 and 6, the expression of vimentin, CD68 and CD45 (PTPRC) is regulated positively in phenomena of EMT in the kidney. This corresponds to what has been effectively observed in immunohistochemistry in biopsies on patients. Thus, the method according to the invention reflects the patient's real situation. It also enables precise and reliable monitoring and diagnosis of the appearance of epithelial phenotypic changes in the kidney.

[0129] It is therefore clear that the method according to the invention gives results that are reliable, precise and consistent with the patient's real situation. Furthermore, this method is painless for the patient, swift, simple and economical to implement. It is furthermore perfectly suited to the monitoring of the appearance of EMT in a patient who has undergone an organ transplant.

### EXAMPLE 2

### Detection of Genes Expressed in the Urine of 26 Patients Showing or Not Showing Epithelial Phenotypic Changes in a Biopsy of a Transplant, and Comparison of the Results Obtained with the Classic Method of Normalization and the Method According to the Invention

[0130] 26 clinically stable patients had urine samples taken as described in example 1 before biopsy of the transplant. Of the 26 patients analyzed, 12 showed no signs of EMT, while 14 showed signs of EMT. Cell pellets were prepared from these urine samples as described in Example 1. These cell pellets were then sent to the firm Miltenyi Biotech Gmbh for extraction of RNA, complementary DNA reverse transcription, amplification, or incorporation of the DNA fluorescent marker, quality controls and hybridization on complementary DNA microarrays from Agilent®. These microarrays are used to make a quantitative study of the expression of the genes representing the totality of the human genes. The transcriptome of each patient was therefore analyzed on a microarray. In other words, one microarray corresponds to one patient. The level of expression of the genes is expressed in intensity of fluorescence after adjustment on internal fluorescence references present in each microarray: these are raw data. The median corresponds here to the luminosity emitted and recorded in the gene situated on the median of the list of genes analyzed on the complementary DNA microarray.

[0131] Normalization by the median eliminates the bias related to the preparation of each of the microarrays. An example of bias related to the preparation of the microarray is the quantity of fluorescent marker incorporated in the patient's DNA or the temperature to which the microarray is exposed. Normalization by the median is done by applying the following formula to each gene tested on the complementary DNA microarray for the given patient:

Normalized value=(raw value)/(median of the values of all the genes tested on the microarray)

[0132] A generalized linear model of a binomial family was created by using the R software:

model←glm(EPC˜x, family=binomial, offset=blood+SFN)

where:
[0133] model is the model,
[0134] EPC is the predicted binary categorical variable (indicating the presence or non-presence of epithelial phenotypic changes in the biopsy),
[0135] x represents each gene tested on the complementary DNA microarray tested separately in this model,
[0136] the blood and SFN co-variables are respectively the mean value of the hemoglobin genes and the mean value of stratifin on the basis of measurements of expression delivered by the complementary DNA microarray of a given individual.

[0137] Taking blood and stratifin as co-variables makes it possible to takes account of the contamination of the collected sample by blood and/or non-renal epithelial cells.

[0138] The significance (p value) of the improvement of the prediction of the EMT variable by the introduction of x into the module is given by the following command:

anova(model,test=“Chisq”)[2.5].

The genes, the obtained p value of which is <0.05, were selected for each method of normalization and used as a list of genes for the functional study of enrichment by means of the DAVID software (david.abcc.ncifcrf.gov). The totality of the genes assessed by the complementary DNA microarray was used as a reference list (background). These results are presented in FIGS. 7 and 8 as well as in Table 3 here below:

TABLE 3
Enrichment of the terms “kidney” and “intercell junction”
according to the normalization method

| | | | Number | | Value p ad- |
|---|---|---|---|---|---|
| Normal- | | | of genes | Enrichment | justed by the |
| ization | Data base | Term | identified | coefficient | Bonferroni method |
| None | UP_TISSUE | Kidney | 8 | 2.68 | 7.15E−01 |
| None | GOTERM_CC_FAT | GO:0005911~cell- | 1 | 2.31 | 1.00E+00 |
| | | cell junction | | | |
| Median | UP_TISSUE | Kidney | 172 | 0.90 | 1.00E+00 |
| Median | GOTERM_CC_FAT | GO:0005911~cell- | 22 | 0.80 | 1.00E+00 |
| | | cell junction | | | |
| 18S | UP_TISSUE | Kidney | 220 | 1.15 | 9.98E−01 |
| 18S | GOTERM_CC_FAT | GO:0005911~cell- | 24 | 1.01 | 1.00E+00 |
| | | cell junction | | | |
| UPK1A | UP_TISSUE | Kidney | 222 | 1.42 | 1.13E−05 |
| UPK1A | GOTERM_CC_FAT | GO:0005911~cell- | 57 | 2.70 | 1.39E−09 |
| | | cell junction | | | |

[0139] The inventors made observations firstly of the enrichment of the term “kidney” in the UP_TISSUE data base in order to evaluate the consistency of the results obtained by implementing the method of normalization according to the invention relative to the organ studied, and secondly of the enrichment of the “cell-cell junction” (GO :0005911˜cell-cell junction) in the GOTERM_CC_FAT data base in order to evaluate the consistency of the results relative to the pathology studied, in this case EMT.

[0140] Table 3 and the FIGS. 7 and 8 which are taken from Table 3 show that the normalization by uroplakin 1A is used to obtain the most significant enrichment for these two terms, an enrichment which remains significant solely for normalization by uroplakin 1A when correction by the Bonferroni method is applied to take account of multiple tests. Normalization by uroplakin 1A identifies the greatest number of genes belonging to these two terms as associated with the presence of epithelial phenotypical changes in the renal biopsy.

### 7. APPLICATIONS

[0141] The method according to the invention has thus demonstrated its efficiency in the early detection of the appearance of phenotypic changes. Other applications in the detection of EMT can be obtained by the method of the invention. The detection of acute rejection of a renal transplant can be diagnosed through the method according to the invention. In this case, the pathological markers sought will be the markers related to the activation of the immune cells in the kidney such as granzyme B (SEQ ID 23), perforin (SEQ ID 24), the interferons or Fas-Ligand (SEQ ID 25).

[0142] The detection of tubular, podocyte or inflammatory cells could be used, through the method according to the invention, for the diagnosis of any kidney disease. The progress of renal cancer in a patient could also be monitored through the method according to the invention through the detection of the markers TP53 (SEQ ID 26), MIB1 (SEQ ID 27), AgNOR, CD44 (SEQ ID 28), racemase, CD10 (SEQ ID 31), keratin 7, vimentin, caveolin-1 (SEQ D 29) and ror1 (SEQ ID 30).

The application's sequence listing, which the Patent Office published only in electronic form, follows.

SEQUENCE LISTING (31 sequences)

SEQ ID NO: 1 - DNA, 118409 bp, Homo sapiens
  DNA (1)..(118409): CD45
agtatttttggagaagttagtaaaaccgaatctgacatcatcacctagcagttcatgcagctagcaagtggtttgttcttagggtaacagaggaggaaattgttcctcgtctgataagacaacagtggagagtatgcatttatttatttacttttacatttttgattcgtttttacagagaaaaacttctacagagataacaattattttgcttttcagaaggacgcatgctgtttcttagggacacggctgacttccagatatgaccatgtatttgtggcttaaactcttggcatttggctttgcctttctggacacagaagtatttgtgacaggtaagtacaaggatattaatattttttaaattattttttctcttttggaggaatgtttgaaatagacataaaaataatttaaatgtgttggtaactggaagtgagaagcctgctgtaaaccatcaagattgttgtctcagggagacatagctagttgtgtgacagaatacattgtttctgtttacaaagacataaatgtttcgggacaaaaaatacaattttaaaaggaaagcaatgtctatctgtatctttatttacaactgttcaaagatattacaaaagcaacattattacttaacttccaaagtgacaataacacacatttataaaagcctgagaattttttaatgataaaataagtgagtttttattcttttaacaaatttgatcttttaaaaagtcataaaacagctttggttgtatgtaagccactccctcttttcagacctgaagtttgcttcctcaaattttgaatttaattgacatattttattgaatacttgggtatataatagttcaaaaatatattgagatatttagtaaaatattaactttctgcaatttttatcacagaatgtattttaaatcaagtttttagtttcttgttaatagttttaatacatttttgctttagaaattcttgtggagccaccgcccttcctgggtggtgggtaaatattacagccttgatgagatagaaatatttaaactcttaaaaatcatgcaaatgctgtattcagtaggaaaatgcaactagttggacttccagtgcctattaaagtttgaaatctttgcacatttatggtctattcaatggatagttcttgagcggcgtcaatatgaatcatgagtacatttcaatagattatagaatgtaactaataattaatatttaatatttctctttatgatgtagtatctaaaaggacattgaaaataaaatttttgtagaaattccaaaaagtataaaaagtattttaaaacaacttgcttattacaattcactttgaagtctttttttgacttttaccgttcttctttcctctgaaagtcagggaagtagctacctcttgagcatgttacattgacaatttctatttggagaggaaagaaagaggaaagaaaaacaacataagatttttgttgttgttgttgtggctgttttgctttttattgcaaaggtgaattttttaaaaatctatatatttgcagcatttgtcttagtacagaaaatgtttatcaagttaccatccctttaaagcttatgataataaaaagtaaattataaagaataataatctcaatgaagtgatatatgtatattatcacaaatcagaacagattttcatttaaaattcccactcaggaaatgtcgaaaagcatttttaaatgagcataaagaaatactgagacattttgtaagccagaatatttttcttctcttcatattcatttaacttctattattttcttcaggtctagctccattgctttttattccaggcaaacttcccaacctcctgaatagaccaaatatcctattatatgcttaaatcagagtgtgaaatatttcctttgtgaataaaaattcaactcattctattacaggatgtttttttaaccataagacacatctttgaatttataattgaaataatatgatggggtctagaaacctttatatcaactttgctgaatgatttataccatagcaaataaatggatatacataaatttattttgaaaactcaactttatcttcagttgctcacataaatattgagagcaaacatttttctaaaagacatttgtagactccctgagatatatgcttatttgtggaaaaacatatacagatataatcatttgtatctgcaaatattgtttataatcctttcaagttgcaagaaacattttgtgatttaatgtataatttggaaaattcttaatgctttaaattatttatttttcttttttagcaacaaatgagttggattctatgtttcattttaacgtgttaaaattagtttagtgcctacaggaaataataaacttttggggaacaaaatttatattgtatgctgtaaaggcataaagaaatagagccaaatgtagagagccatcaatggtaactctatgcataattcaaatattttatttaatatctaaaatgcacacacggacaaggccaaagttaatctttgccacggcaacaaccaggcagggttcagttttactcaagacttcctaatcctcttgctctgtgcctctttgccatggcaactggaagccaaactttgtttagaatttctaaataatgttaggggacaatgatggttttaagaaggcaggtgaaggtgagtgttctctggttctaataaagttgtaatgccaggcagatctaccacactatagcatggcagttaggagtatatgagttatggtatgtgaggtatatgatgagttttgttatgagtcataacagttaagactcatttcctggacataattcttcatttttccatctgtattaaaaatatatatctcatgttataaacatggactgtgccttgcacatcacagacattcaatgaaaattatttaattgaatttggtaagcagtcctattaagttctaaatactccataatttagagatttgggaatgtgattagaattacttattaatttgaaaaaaaatgtcctactaaaaacctgcctgtgacctttatcattgctaaagtttgaaatgtactttgttacaggaaagactacggctagggcctatattatctttttctcttttgttctgtgtaagtaagtataggggcagagtagttagcttgaacttagttctttctttgttctggactatttgctatcctctcaccagtgacaattaaccagtatagaaatatagatgtttctacattgttcatatacttgaacatatatttctttatgtagatactcacacataaactagttatatatttgtgggttatatatactagtcaatctatctatctgtctatctatctatctatctatctatctatcagttctccatgtttgtctatttggcgttcccatgaacttcagaccttcgcctgtgttctcttttctccatttggttacgtatcattgcctactatgtgttgatcactctgattctccatctctagactcatccctcagaaacacggaacttactacctttcctaaatccagacattaacatgctccccaagtcctgaaattttgctttgtaataatctctaataacttcttgctttgacacctccattgccatcatcttaattcatggctttattatttctcacctgtaaaattgtaatagtttttttaatcagtctgaagtctcatcctttttttaatgtaatctacagcttaaaaagtaaaataaaaagtgaagggttactgatttcttctcattgcctttggtataaattctaatcttttttgccagagaaactggttccactaatgatctgggggctaggcctggagctgggaagggatcttttttcttttctttctttcttcctttctttctttctttctttctttctttctttctttctttctttctttctttctttctttcttttttctttctttttcttctatgattgattaaaagaaaacaaacaggaggtagttttaacacccacctctatactttctcaaggtgtttaaggttctgggcaaatcctacttcttctattatgttctcttatgtcacttttgccacaaaatatttccattgaattgcacactttttatcaccttttcttggcatttttcaagtcatttcaatctgctcttttttgtgatgatgattgatgatgatgatgacatgtgaattagtggatttcttgacattgtaacctacatgaaatcaggtataggagacacaaaaggcataaactcatagttcccatacctaatttttcaccagacactgaataaatcatagattaaaaaaataaaactgcatattgtagtgacaaaggaaaggaaaattttcaaagagggaagtcaaaaagagggagaatatgagataaaaaaattaaccagaggcgaagtgggaggatgaagacagcaggactattttgtccagattaaattaagttgattttggatctagatgtttacagtcttgcctttttgtttttgtttgtttgtttgtttgttttttctttgctccctttcttactctccttatctcacctctcgtctggaaagagcctcctgacttcctaaaagttcatagtttgagaatgtttttcctaaattttctttgatctgctctttggacattctaggtaatgtaatttggagggtcaattttatttttcagatacacatacccataggagaaaaagcaaggaatgggagggaaatacaaatgtagcggagtgataacacaaacagatcaggtccagtcatggcaattgctggtttgaacactgatgctagtgctctgggattgcttgcaagggcagatggaatatggtgcaccctaggtgttgcattatttgcacgacaaaagtttgtagagagctgggaataatttctttacagacagtgtggtgatgaatgtcaatctgagtaggtaaggggcagagatttgtactgaggttgattcattctcttggtaaatacacaatgttcacaaaggcaaggtttcatcttcagaccatgtgtgtatatgtcaccttggtgcagagagagaaatttttcatcagtgctgacctttgatttttttttctagacatcttatagatttatgtagttatttacatgggaaacaattagaatggaaatttaacatatcttcagtttaaaattaatttctgtctagtctaaatatctttgtaagtactagatactcaatcccatagcagtggccttttaccaaaggcttagtgctatgacttttgcatacataaagacctcactttttaagatatgatacaccagaaaaaaaatatggcaagactttagcaatatgatttgatgcctatttctatataatacccaaatatacaggaataaaaattatggcaatcactggattttgtgtacctggctctaaccaatatttatattagaaaatatctaattattgtctaaaatatttaatcttcattcctgtttgtatgtcagtgtgctacttcaatatcagtctgttaaaagagtctaggaatgactactataagcagagaattatatgttcaggaatcacaacaaaaaacaagaacaaatagagaaacaaaagctttcctactctttcatctaggacaagaataaatacacataaagtcaatattagtgaagtaaacaagcatcttctatatccattcatagtaccttcaattgattgatttcttaacagacaatcagcaaaattatcagtttttattagagattttagtagagaccgagcttaaacaaatatattctatggtgcttaactctatagtatttaaagattcaatatttatttcctctaaaaatgagtcaagtgtctgaaaggaaaaagccacctaactgaaacttcagtttctactatacagggtatttattataaaactgtaattacaatgcaattatattgaagtataaatgatcatcattcatttatttaagaatataatcaaaatttgcatacctggaagaaaccatccaccctccaaaatagggatttgctaatgtaggagtagaaggcaaaagttgagggtaactcaggtaacacactcatacgtattaggatatgaacagctggtatagcaaacttgatagaaatcactgatagacaagaagacattctctgcattttaaattaaagtacaatttgtctgtggtcattcaagagatagtttagagaaacctatacaaataacaatgatgctaagagacaatatcaaaatcacaataaatatcatggcaatacagtgtggccactatattttaaacacatccacttgatgaaaaatataataatttactgataaaacatattaagcataatagaaaatgaggcagaaaccactccaagctgggaaacatcatgacatctgtagtgataaatattttgaaaatctaactctatgaatcttgtgatttttagctaaatcaattttcacccttgagacccaatttcctcatctataaagtgttgtaagcattaaaagttataatatttgtgaaaatgctttgaaattatgtgatactctgagaagtaaattttttcatgtgagcccatgaaatcagagcacatagccttttagcataaacttgattccaaatgatatctcttcctttcagacactgtgagcagataaagggatagtttaaggttaagtgatagaggcataatcccttataggcctttgaattcttttaactttgcattctttatttcagagatttttcaggcttctccagattctacagtctaaatagtttgtaaatccacacacttctactttgccagggatttcttagtgtaaaaatatcctgaagtctcacctgccttcaatccttactgtgtccatacccaccattaccaggataatctttgtaaaaggcagaacttacctttgtccattcctcttttaaaagctcctattggtagaaaatatactgaacccgtgatttgataccaagtatgttttggctcaacttttatgaaaacaaatatttaattagaatataccaacatttatgagttttccttaaagataaattttggaggaaaaaaactccattagaccaatttaattccctgatgattatatatatattacctagtgaaatccttggcagtttttccattttaattttaattttactgaactaatgtttagcagcatcactttcatttaatttttacaataactattagattcatgaatccattttacccatgtcaagttctactgaatatagcttatgcttggaattttcctttgtgattattacttttctaaaggtaattcttcttttcaaacaatacagatctaaattttccaaaaccatttaaattcttctctttggccagaaacattttctgtgtgtagttttggctaccgctagtttagtttttttaattggttttgtgtctcaatgctacaaaaaatataatttatgtaatttttcatttttgtcaaacttaaatcgggcaatattaaccattctcaattttttgttgtgttgaaatttctatcagtgacattaatgtggagattgacagctctttgagctagattcattttgaaattttaagactttcgattatttcttatctagccaatagaaactttagaaacacttttaagactgcttgatagcctggaattattatgtttgaattctcattcatttgtatggtattcctcttattagctttcacacttagtaccaatttcttattcattattggagcaaaaagtaaagagaagaatcaaggtgataagtttaaaatcttctcaatgtaaaatagtgtgtggggaaagtgtcaaatcatcctactttggtctttgtgcatttaggaaaaataaaagcaattagcattgcacacacatatgtaattgaatctcttcagatttgtctggctttatctctaaccactttgtgactctttttgtaacttgcatttttctaaaaatgtgaccttgtttggtcttcctactgttggccatgctgtttttccttctctccacatctttttatcaatggtgcaaattataaattgtattcaaatttactgtaaagatcatgtcctctagacagcccctatcccacttgtataacccttgctcttcagcccctttcacacctgcataggtattcttctgctgtgatgatcctttgaataattctcttggagttctctttaccaggctctcttgcagcaactggtgagctcatgtaggctatcactgggtctctgcttatttgccagtgcctgcaggtcctcagtacctgtttgctgaacaaacgaatggtctgtcagcttaacccaactctgtatgtagaaggcacttaataattcttaaaaacaattttgattctgtccttttattgttatttatgggaattatttatggtaaaaatttctacataatagaaaatttggaaaatgtcaagaaatagaaggaaaaagaaattgcttagagcccatgctaacattttgtttttcttcctctatcttttgatcacatgctgtgtatgaaatttcatgttcaattttttcccaagtaaaccttgattattctagacaatttgaaaaatatagaaatgaatagaaaaataagaatttcaggtttccagttctcaggatctaaaaactttttgagtatttcatttgactaggacaactagatctattcagttatttattaacttattagttcatttgataaacaactattttgtgagtgttttccatgtaatttgggctgaggacacctatcccatgaagcccgtattttctatcagtggcttcttggagatggtgttttaaatcttccaaaatcttcatcagcaccccaaaacttcctcctcaaagtaacaacataccttgctacagataattattggtgttatcaatgttttataaattataaatttaaaaatcactatcttaagatctatatataacatattaagtaaaacttatattcttacaagacttcctccaggtccctgttacaaccagattttctttgcagacttttaaattatggaagttctggtgctgccactgagttgtgtagattattattagatattcaataaataaagttggtagatgtgaagaggtactagacaatagtcctattttgttttggtttgtttgttttgtaatttattctgaaaaaatgtttatgtggagagaaaagggaaaacatacagaaatacacagcacacaaacaaattcttacttttttttggtagtctttctaattttccaaggtcaccagctaatagcaaatgagagttgtagggggtggggtgaaggctggggtcttaatcggggtctatctgattctagatagaccagattctagattttccactcggttactcaatcttcttagtggtcagtttaataacctggaatttaagacatgactgtgtgatgatgggcaaatcacagcaggactgaatgggagctggtaatttctcagaggttgtttgtgtgacatatgcatgtaagttcattcacctgatttagctacttacatgaaccattgtgcactgagctgcttctatatctttagcatattctgtatctatgtaaaattcacataagattgtatgacttttataaaaaacaaaaagacatctttgattaatttgtcttcactatgaatactgatgtgatgtgttacaatcatcctgaaaaggaggctaacaaaggacaggactgagtctgtcttgaggtgagtgatatgatggaaagaatggattttcccccacccaactcatttttgatattacataaagtgaaaaacattaaataattcaccaaagtatctagatttttttttgtttttgaagtgcaagggaagtaacttgacctttgttaaacactttgatcatggaaaacacataaggttctcatcttattccaggaagtgtagacactagataatcttttcatagtcatccaaaaagcatattaagtgaaccaggtaaatccatcctacactttttattccagagacaagttggctaaactttgaggagactaaaacaaaacaaaaaaaaattattgtttggttcatttgataaatgtggattccaatcatataatttaggccaaatattatactttgacttcttagacttagatttccagatagtctggtttataaaataagattttaactatgcttactaaactctatgtatttctactttccaatgacccatgttcttattttctgaatttacttattgatgctttaggtatgataaaggtatgtaatggctaaggaaacataaatgaagcataagacatcagttgagagttttgacggaaaggaagtggtgatatgaaggaaacagataaaccaaagaaaaaggaaaaggtcagggagctgataaaagtaacttgaagaaactttagtgcaaatgttggattcagacaatcgctacttttaaagtacttaaagaagtcagtctttgaaatcttgcccggattccattccagtttcatcattggagacttccaatgatgaaaaattggggaagaattaccttccaaagcctcagtttcctcgtgtgtaaaatggaaataatagcaagagatattaaatgagatgattcactcatcgattcatcaattgtttatagagcccctgctaagctaaaaactgttttaagtgttgacacagtggtaaagaaagcagaaagtgtaactacttttatgaaactgacttcctagtggtgagagataacaagaaaacaaacaacaaattgagataacttcagttatagataaatgctgtgaagaaaattaagtagtgtaatatggtagagtttaatctggccagacccagatttaggggtgaatgcacttttagacagagtgatcggggaagatccttatgaagaagaatcattgagctacctgttggctgacaagaatatggggatccatgtgagggagactggcaagagtaaaggttatctggcaaaaccaaacaaattggtaggttcgaggcacagaaaggtcaggcatctgtagtatggtgagtaagaactgagcaggttgtggtgaggctagaaagataagcagaaggcaggtcccacagggccttgatggaaatggaaagagcttgaattttacctgaagtataaagggaaggaaccattttaagttcttaagtacagaataacctaatcttctttctgtgttgaagagatcactttgactgttatgaagagaatagattggaagtaaggcaaagcctggaagcagttatgaggagactgaatgggaggatggagaaaggggatggtgatctggaccaagtgttggcagtgcaggtggaaagaaaggaaagactgacatagaattaagagaagtggctgcatggaaaagacaaagacattttagagaatgactttttttccccatgagcactgggatgggaaagagccaaattagggggtcagaaatccagagttatgtttgggctgttattgatgtctgattttcattaggtggtagagaggtcaagaaatccgttggagataagaggctgaggcccattcagtaggtctcaactggagacataaacataggagtcattgcattcagatggagcttaaagctaagggactgcatgtgacagtgtaaataaacatgtagagagtagcagatgactggtttctgagccttgggaaacttcatatttggaagagacacaaggaggagctaggaaaagatagtgagaagaggtagccagtgaaaaaaagtagaactatactttgctttgaatgttgaaaagggttggcattatagtgagaattcagtaaattccacataaaaatctgaatttatgtctcccctagaaaggttggttgtgaacatgcaattggtaaatatctctattaactttaatattgttacaaaagtaatattaaggaatttataatatttggaagaattagatgtctttacctaatatatcccttgctagcttaacaattagaaaaagaaagaggtacatcttaacataatttgttttaataaaaactacagaatatattgagagactaaagaattagaaatttaactgaaaatttcatgcaaaggtaatgctctgttgaaccattttgtagcttatgttttgttttgatacatattttaaaatattgtttaagacaatacttgaacagattgggattgtgtgtgtgtgtgtgtgtgtgtgtgtgtgtattggttaaataactggtttatttttaaactgaaattaaaccttccatttctttgagaaatttaaaaagtagttgttatcaatgtggcagatattaggtagaatctaatatcgtgaaaattaaactgcacataaatagatataaatccttttgtcagtgtgtgtatatctctgtgtgtaattttgatctcaggcttggcaggtttccttaaaacttttttttagagctacttaattttgtacttactggtggttagctaataagaaaaagctaataaaaaatagtgcttactctgtgccaggcacttctgttaacattttataaatgttatctcatttaacaagctcatgtcattgtatagtctagcttatacttgtctttaacataagcaaatttgttaatttgtgtttcctgatattatcataaaatttactggttgtcatatcctaaaagggaatagttcaatttaattttccttgttctaattttaaatacagtactaaggttgagaaagaaggggtcaggaaagggaagtaacattgagtgtctcgtgtgcctggcactccatatgatgcttcaatgcacaccaggctattcagcctcagatttgtttctacattgcttctagttctacagattattcaacgaatgtacaatccttggtcactagtcttaatagggaaaacagaattatggttaaaacaaaagagtaagtaacttaaatatgatctatcggtatttattttgtattatgatattttgcttaagttgaaaaaagggcgcatcaggtgttttggcagtttactgtgatctcaatagtgagaatgtattgaaaaatctcagtacaggagaaagctgtgcagctttctcttcctgtcgctgcttaattttcatgtagatataaagccgcagtttaagcacatctgcttaatccttatttaaaagactaggagagaactagaaagggagggagggagaggaggggaagggggaagagattgagagaaatctctcccatataacacaaacactgtattagtgtgtgagaagcagataatcgtgcatgtaggcactatcatttgtgaaatcagaaagcataatttactcccaatgctgaataatctagttgtgtgtaagcaccagagagatatttaaatacctatccaataaaagataataaaagcctagcaaacctaagtaatccattttcagatgttaatccaattacgtaaacaaatattacccttttttttttttggtcattgtttcaaggataaagtgtaaatgaaagaaatagcattccatctaggtaaaagaggaatcagcatcattgaaatgtgaatagctgtgattcctccttgctgaatggtaactttagaagagagggaacccaggagtccatccagaggctcaaggaataagaggttctcacccataggaagatgaaaaatactttcagggtgacccatgagggaaaatcaccaaagcctttgaaataaaagattttcccttttctaagaataaaagatggtgttatgtcaagggcggctcgatggtgtggatgaaagaactattgggaatggctactgaaagatcaaaggcaagtggaacctcaaaattctggaagtagaacgagtcagatacaatataagaagtacttcaaaggcaagaaaataagaataataaaaatacctttagttgtcaaatgtaaaatttgtgccagttttgtcacattccatttttcaggaacactgtaaaggtattttctattaatatcaatttaactgtacatatcttcccatctatcttaattagtcacttttcaagaacaaatgtgttatgctcaaagcatccaaaggacttttttgttagccttaataaaatgctttctcttaaactaaattttaatttagtttacatgtctacgtataaggtggttatagaaaatgaatgtaaaatcacttcattaagtgtaacaaaacaaaataatatgaggaattgttatactgtttaagcatttgaaaaacgataaaggagtatagaaattttgttaccactactatgattagtttctcatttggtttttcactttaagaattggaataaaagttgaaatcttgattaaaaaaacaagaaatgattcacaaattattttacaaattgaaatactgaaatacagaatgttcaaccactgtcaacatgaactcctattctgtaattaatctattctataaacatctgtatttgctaaagagcaacagatcaaggaaaagaaaaaataatccttgccatccatagagccatgatttttgtggaatcttcgctccagtttaagttttgtcagtgtctggaagaaaatacttcccatggatcatctttttgctaaagagtattctttacattttaaaacatatgaatatttacataaaggtgtttgtggaaaaggaaattatgtgccttttattttaattcacccattattctattccacatgtaaagtagaaaatactactttaagacaaaagtaaagcattatttatttaaagatctattttgtccatgaattttatcagaggtaacgcttcttaatgttattcagtgccataacttgccttttttctaggcctccattttatgaactgaacatctggatttgatggcaagaaaacatttccttccgctggcttttctaataactccctcttacagatatgcatgcctcatgtttgttaataaaattgacgtgattttaatatctggtattttaacacactgtgaattatggaattttcagtggctttatttaattaaatgcattttaaaatccttacaaaaaaatattaagagtaactctaaaatgtattagagccacagatgttttcctttatagtgttaattgatttaaggtccatcaaaatgctgttaaaatgtctagaggttaacaataacagtggcacatgggtcagattaaaattctttttgagtaaaataaataaataaatgacagcttattttcttctgatttaaaaaaattagctagtggattgaaacaacaatgtgatagctaagatttcattctctcactttataatgaaaggagatttaaaattagggattatatggtacacgaaaaatttatatacacagattacaagtactagtttttttagtgaagaaaagacaactatatattttctctttttatctgttgtcctattttacaattgtagcaattaatctgccaaactctttaatcaataaaatatggtatttaacaaccaaatttggcccctccctccccttaaatatatttccaatgctccttgctccattttaaacctgctgtcctttataagagaataatatattttgtaatttgagaaaatcatgcaaaggaaagtttctcaaaattcacattaatatgtaataatagtaataaatatgtataaccataatatcttagaattttacaatattttatagaaaacatgaatattaaagtgaaaatttaaacacatcaatttttcatgttaaaattactaagaatgaactacagattcatgaatactaagggcaacttttatctcaggaaatatatcagtggactgaaaatgtcaaatcaattcaattaaatcagtaataacactttgctgtttatgtggctgttttttcttctatttttattgtcttagattgcatggatacaatcaaaataagttaatttgtatacaggatataaatggaccagagaatgtgtcttctattaaataataacaaataagaataccttttattttgtgatggtctttactatttactgagagacaagtattgttcaagttgccggttttttttaattagctgacatatttcctgcttttatttgagttagaattcctgtaccaaacattttaaaaagagaaaaaaaattaaagaaagagaaaaggaatttggaaactactataatgtaaagtagcattatttatacaacaattaattttagagaagcaagagaccttagaaataatctatttcaacgcatctattttacaaaaaagaaaattgaaactcatagatatttagtgacttgtcctttgttacaccaaaaatgagggaacttggtctagaattcctccagcatattatgaggtatttgttctgtggcctgatacaatgaaatgaatgttggattaggcattttgggacaagttttgaatcctaactctattactaattcctcttcactagactgagattctggtatgtggtattcaataagtgacttgacttctttaagcctggtttctttttcagtgagatttacagcttagactagtttctgaatcttgaccctgtggacaatctagttggagaactgagatgacctgggcattgtaggatgtttagcaacattcctgcctctgtaaactagacacagcagcacatttacccaacctgctctgactgtgacaaccagaaatgtctccaggcattgccaaatgtcaactgagggcaaaattgcctaccctagccaccttaactgaaaactacaaacttcattgaaataatttctttatggctcccagcagtaacactgtgctattctagaccagttggttaaactactggatgcttcatcagaaagcacccactaagcatcactcaccatgaagttcgttgggtactctatacaatgaacaaaggagatatcacataatttttaaaaaacttaaaagattcacaggtgagaattttgtagtaacaattaagtattaactattagaaaaatttaagaagttttaacaaaatgatataaaaatatattcactataagtaggatgtaatttttgtcctgtaagagttatccatgtatttacgaattgtacctaccagaggttacaaaaatttggtcattatttgaaagattaacagggacttatttccaatcatagatgttcactatactattctaagacatttgcaactgtgtaaggcagtcatttccagtaagaattgctagaacaaacattaagcatttcacagtgaaaagggtcataggtatattttcatcctttgcatatagaagaaatagcaatctattattctcagtttttgacttaaaaggtattgttgcttccctttctttccctcccctactcaagtttttgcccatggatccagatacctacaagggcctaatacagggaaagtgcactgtgtatgagctatgaaggcacaatggaagcttgcctggcaatcagtgccagaacagacagctagtctgatgaattctgctacacatcacagggctactagttttttgttttttgttttttttttttttgtcatacattactgcaagttccctgaggaagtttactgatctgtagttttacgagaaatgcacgtcatggaggtggcgtgggggagcgggtgaacaaggaaactttagttgctataaaacaggagctgagagctcaagcaggttggttatgttctgccagatggagataaaactgtggcagccacatcctgtgactagaaattgtttaagtaggcagacctgttggaggactaaagaacattaggcaaggagattaaattagtgtaggaaaaaaaatcagttttgtttaaaacgaaatatctacttgtgttaatagaacattctaactccaccataggatggaatcaagaggttttttttttaatacatatagtgtatatatataaatatatatatacacacacacacactgtatgtattcctatgtagattaaatattttgatttacctctttctagtaaagcaaagttcattctgaaatccaaaatattcacttactagagcagaaaaaaattagctgtgcatttatgctgatcacagtgtagataattaatctttaagaaagtaggtttttatgtttatagttgataaagtgttagtggcaagaactttttctgttattgaatattatcatcagattactcgtgctttccattttattcctttaaaaaaatccaacttttgtaagccaccactattttctgaagattttatttctctctaagctaagaaaggatgtcaagaataaaccattttctccttttaaataaaaatgcattcactatagatattcatttgaaatctcaaacatacctgaattaagtatactcagttttgtgagtgaaaattaattattatttaaaacaaaacaaaacaaaaaaaatgttcagtgttttcattttacttctcttgctgcttttgggctctgactgggcccggaagcagaagttgcaaaacattatgagaaaacttttgctcttttcttttttttcttcaatctccacccatatggaaataccagaaatctgaaaccccattcttgctaaatattcttctcaggattgtatctctactgcaggtcttctatgacgttttacagctggcctctttccattcagaattgctgttcatctttgaatgtctctgctttactcctgaatgaacacaaacacattttttttaggtttcttgttgacattggctttctttatagcccataaaaaatgcatttgtggcatctcttccacagacaaaaatagtataattatgattcaatactcgatgaatgtgtgttaaactaaactgtgcccaagctctgtgcaacagtacaggtttttcacctttccaggggagagatgtggagcacatatacatttcagccatcctacatgcccacagggacatctttctggtctgtctcattggaatacccttccttatttggtttttagtttctttctgctttaagcacctttcagagagagagagatgttttcctttgtctttgtataggcagtgcctatcgttacagagtagcctttaaatacatatttgttgaattaataatgatacacatgaactgatgaggctctataattctatgagataatctggtatcgtgggaatattttagcatgttttgtatagatagactgacactatgactggtaatctgatagtaaaaatggcaaaatattgagcctgagtattattttattatgttgctttcttatacaaggagggaataaaataaagtgatgtggactgtaattgtgctcatgaaagacacaatgtatacatacctccttgagacggaatgataaggataacgtagaatgtttaccatgatttatcagtctctcctatataagaaaaatatttcttgtcctgaagtggtaactttggtgaagtcttttgcttgctcttttacagactaattaacaagttttctatgccggctctgtcctttcctctcctctcacccctgaaaagtggttaaaagtttggcatttgttacccagaatactaaatgtaacacatatgtggcaagatttgatggaattgcacttctgttcttattatgttcctttctggaaaattatgacaatttgtgtccccttagagagtgtagcacagttttctggttgctcctcatgataatccaaaaaaaaaaatccagctaacccttaccttttagagtaagaatctttagaagaaagagtgctttcatcaaatcatttgagaacgttaagttgaataactgatacggtactaccctacagacatgcgcaggaagtatctgcatttctgtggcgttctgctaaggaaaagaattttctttccagacaagatttttcaaaatcatattttaaaaatatcttaatgatgaatttgaagttgagaaccaacttatttcaagtaaaattaaaattttgagagataagagaatatactttttttaaggttagaactcagaggccattatgacaattaatgggctagtggagacacctggtctctaagaaggagacaccagcttcttcatgttttgatttctgccttgttctcttgtctgtcaccactagacacatactattttatagtaattacttgcatattttgtagaaaaggcagctgtgttttctacaaatatttcacaaatgttagtattgctctatgccaaggaacagaagacaaatttgtggaaaagatacatgtggcccctccccaggtgggatttcttgtgtaggccccatgcagtggagggacagagggggccagtgctcattttgaggacacgatagttcggactgtctgaggaaatcgacagtgtgtgtttaatgaccaaaccaacatggctttgaagaatacatatatatttttttttttgctttttttttttcattgcccaggctggagttcaatggcatgatctcagctcactgcaacctacgcttcccaggttcaaagaattctcctgcctcggacttctgagtagctgggattacaggcatgcaccaccatgccttgctaattttgtatttttagtagagacagggattttctatgttgttcaggctggtctcgagctcccaacctcaggacctcaggtgatctgcccgccttggcctcccaaagtattgggattacaggcgtgagccactgtgcctgaccaagaatatttttcttaatttttctgtaaaactagttgttttagttttcaaagaaagatattttggtagtttttctttaaaatgcatatcatcatacagaaatcattgtccacgtatatggacatatatatctatataaatagattatatctatataaatatatagatatatttgtccatatatatgtccatatatatatatatatatatatatatatatatatatatgatcttttttttgatatagtgtcctagacctggaattcctgtgttaaaaaatgaaaacattttcagtctcttcatatatattgacaaatggctttcagaaaagttgtttcctctattctcttcctaacattgtatgagtttcctttcacatacttttgtcagagtttaattttatcattttcaaaagtgttacttttataaaaactggtatttcttcaatttaccattttgtgattaatttaatttttactgtgttcagggttttatcatatgcttattatttacatttcctttgtgaattgtgttcctatgatttgcacatttatcttttgtgcagctgtgtttaaattttgaatataaagttatatgaaagaggaaatatgtaatttacataaacacacccaaatatatgtgtgtgtgtgtgtgtgtgtgtggtgtgtgtgtgtattctgtgttgaaataaatggtagaaccaggacaacaggtagaggttatgaggttgtcatctgtgacacagtctagaggagaaactgtgtgggcatctatcaacttacctttttgaaagaatcttaactattagtttctggaatattcagagaagacttgtaaggccaacatggactctagtttccatcctcctgagaagacattccattatgaaatctaagtaactttgacagcaaacccttcagtcttatcattttcattagataatctaccaccaacacaatgatccaaaaatgcattatattcttgcactggagttcttcactttttgcttcaccccaaaactgccgctcctaaccacatgcttagctgctaactttcacaccaggcttatgagaacagtattttcagtaagctctcttttcaattcctttcacaatggagctgcagaatctttgagttgaaagaagccttagaggtgactaggatcaatgtatatatatccctcttaccacacacactcactgaatattttctaaaaactacattaagaaaaaaagaaaagcctaatttagtgctgaactgctgaaatattttgaaatttgtggtttcaaaatcttaacactgttaattgaaaccaatgtttctcatgccttttagtctctggactcctttttaaacattcttaaacataaacctaatttttagcataattgtggaatataaagaggttttgtctatgtgggttatatatatttattgtaaaataaactagatagaattttaaaatatttaattatttattaaataataataaatcaatatattaatataaatagcacatattgtatgaaaaacaaccagatattataaaacaaagatttaataggaatagtgtcacttttttgcatttttacaaatcttttaaatgtctgtctgaataatagatagctggattctcatatatgctttaatattctctatctgttgtaatattatataccatatagtttctggaaacattaattttctactaatgagagaatgagagagaagaagaaaaataacttcttagtactgttaggtaaataataatactcataacacttaattaatattattttgaccttgaagaatctttaaaaggttcttggggactatcttgagtctccagaaaacactgagaaccactgatacgccaacaagataaaattcttatccttaccgcagcatggaataggaccatactttcttccttataataatacttcaagtatttgaatgtatttattgtattttcatctatactattattttttaggacaaaatagacttctttaagttttccgtatttgacacattatcttgctcccttccccactacctacctccggttagcctcctctgaatactcttggatttcaatttcatttataatgtgtgatattctggactggacacagcacttcagggacctggtatcttgaatcaacaaagacttgtcttccaaacgatggtgattaagaagccaccatgtccaactggtcagccagtttttatattgtacaaatcagcaatctcagagtcaacctaaccagatttaggcaaggcacttccatgatgtattgatgtattggctattttattaatagtaatatcaataaaaataatcattaagataactgataatattcaggacttcatatgtgctagatgctatgtttaatgcatacatttattcactcttctaattcttaacaactttataatgtatatgtatttcttattcttattttatagataaagaatctgaggcatggaaaatgtaggcaatttatttgagattacagagctaataagaggcagagccaatgtttgatctgaacaacttgattctaggatcattttggctgggaattttctgagagctgtgtgtgtgtgtgtgtgtgtgtgtgtgtgtgtgagagtgtgtgtgtataaacatgagaccatattagtatatacacaaatgtcaatatatattttaaactggaatgttttaatagagtggcttatatgatagaaataagagaaatagaggaggatggaaagggacaaaaaaagggaaaagtaattaggaatattgaaaaacctaaaatgtagttctctccatattctggatactcctgcctttttcttccactttccacacattgaccagtattcctttctcctttcctaaaatagttttacagatactatagatacccttagctatttgacagttatgtttctgttcttttaacatgtctgcttctataactgtcacacttaaatgttttcataggaatcatgaaaactatagtttttcctccaacgtaaggatctcatatcacgctttcattctgaactaaccattccctctctgcagttgatgtaactgtgccatgtgaccattgtacacatgtgggagggaggagctgaattacgcctgacccctggccagagcaagagctactggccaaaggggagattgagcatctgtgttgtacttcccacgtctcttcacctaggaagtgcaatagatttctgacgagtctatgattacccactgatgaataaagacaatctccctgcacaattgcactgcaggcaagactgaacttatgaccaccacttctgtgtaattttgaatttcttagacctgaaccctgctgagtacacctgcttccctctattccttgctgaagttcattcttttcagtgcgttaatggagccaaaccaagctggtggtggtaacaatttgaataataatagtctttaactttttatcttttgaaaaatagaattctcaggagcacttttagctataagattccttcatccaattaaataagctttaagcttcatgaaaagtgtaaaagggcacaggtgcatttgtggaaatagaaggaagcaatcttgagcctgaatacattgaggtactggcaagcttctggaagtagttgaagaagacttcagttagaagcttggtcaaatggacaaagccctgacctggacattggagacctgtagccaccttctgaatccacagctgacctagtggccttgatatataatattgattgcaggatagttttgtgatggttaagattgcaggctttaataactagatttcttggatttaaatcccaactctgccacttactgcttttctctgggaagagtgattaaccgctttgtgcctcagtttccttatctttaaatgaaaataatttgagtgcatacctcacaggtactaaagaataaatgattggaaaataaacattattgaatatatgttagtaattattattttcattgttatgctattattatttttattattaatgtatgacatcatgttacctgcctaacaacagagtattgagacaaaagcaaaatattttttctatattaataatcataataaacaccactaatgtttccaaactatacttttttttaaccctacatgcctttagttcatggaaagaaaagtatgttaaagatgctatgggggtgaagagaatgataaatattattatttaagacaatgtttgctataatttttatatatcaaataagtttatatgttctcagaaaattggtctttgaataattgaggacagtgtgggtttttattctgtttctggaaggcggtgcctgtggctgtgagaaataaggaacagaccatcttcccacatttgagagggaactatacaaaaatgggaaaatatttgttttaaatatcttttggatgtgaattttgtcataattgcaaactgttttggcagcaaaacgaattatttcggtagcaagaagagacttaacgatgctatgtgggagaaaaactaagtccctactatctttctgagagcacgtctcagaggacatgatgtgatcctgtaagtttgtagcaatcttattgtgccccagtgcagacactccttcctacttccctgtagaaaacagaactgtttttttaaaattctttctcaactaccatttttaatagtcatgttacttgatgacaaaatctgatacagtggcctttaatactatatagtgaatgatttttgaaaatttggaaaactctaaccgaaatataccaggaactgctctcctcttcatctcagatgtctacttcctcttcagacctgtgtgtgaagctctagaataggctgtttgggaagactacaaaatctcctctccgaggtcccttataaccctgatagttgctagatttgaaatcaaggatttattctccccctgccctgagcctctcccttatgtccacataggctctagcattggaagaaatattttaagatctctttctttttgactttgtgatactcccatattaaaaatggcttatgacaggaaaaggacaaatatgctatattttttcccttaaggctaatgttctcgggactaccatgaaaaatccaggtatcctaatctggagggttaccctttggatctgaatgggattggagtcagtacaaggggtggggagtgtttttagaacatcccggcagcatttttttttttttttttttttttttttgagacggagtctcgctctgtcgcccaggctggagtgcagtggtgcaatcgcggctcactgcaagctccgcctcccgggttcacgccattctcctgcctcagcctcccgagtaggggggactacaggcgcccgccgccacgcctggctaatttttctttttttttttttgtattcttagtagagacggggtttcaccgccctgctgccttttaaagcaatttaatacatgagttaaatatcatattttaaaaatagattttattttttattataattttgatgaatgcatttttgtcaaagttgtcaaagtcaagaagtcattattgagaccctgagggtaaggcaggagccaagtgagaacaagcagatgtcaaagatggtgaaaaactagaacagccaggtcccccaggcatatacagagaagttttgcaatggcaggtccccgtggttgtctgacccagacttccaccttgaggtaactggggtaactataacgatattttcatcctgatctcttcatgcagttatatgtttccaagaacagataaactgtgaacttaatacaagtgtctcctttccttggattctcaccatctgggtggtaaacatgacagaaacattcaagtatgttcaatgtagtacatggtaacaaatgctttagcacagactagggagcatgtctggcaacatgttggcaaataattaaattggcacattcaggataaaatgagaacatggaaaaacagaatatgattctctttccagccctggaaagacatcccaagtgtacgtattgtttatattatgttattagtatatctttaccagcaaagggcaggtcatcatcattcaatatgctcaaatactcacatttaaagacataggcactttgagaggccaaggggggagaatcacttgagcctaagagttcaagaccggcctgggcaacatggcaaatcccatctctacaaaaaatacaaaaattagctgggtatagtgcctgtggtcccagctacttgagaggctgaggtgaaaagattgtttgagtcgaggaaatggatgctgcagtgagccatggtcacaccactgcactccagcattctagcctgggcaacagagcaagaccctgtctcaaaaaaaaaaaaaaaaaaaagagagatgtagggagcattgtggacatctattcatggagggttaaacaatagaattagacaaccatgtgtatgtgtggaatcatgtgttttttccacacatgtaggaaggagaaggtaggaacaatgaaaagattcttttagtgatcatagtggctccaaaacagatgctttggtatatgtaatacccatttatcttataaagaaaataaagaaataataaaagcatttgctaaccatgttagatgctatagtaaatgtaaaaataaagggtctgttaatctattaactgagcttaatatatgatgtgatataacagcagccttcaaatatgcggagggctataacagagatcatgatgaacagacttttattctggcttagaaagactagacacagaaattaaaggcataaattactctacaagcaaagcaatcttaacataacactcctttcaaggtagactatgaatatttccaccaataatatatttattaaaatagattccttttcatttgtctttttaagttaaacataatcttgcttgaatgaggatgagtataagatacctcagtcatgaccttgtagatcactgcatcagccagctttgtattcagctatcaaacaaaataaaatgtgatcactagtggttcaaatacattggagttctacaactaaagatctaaaggaatgaaatccatgactagtacaaagacataataatgccctaagcaacttacgatattttgatgtttcttttctgacaccccattcgataggcttttgtcttcatgctcagcatctcctatctcatttgggatgctatgcgtccacacctttcatcacattccagcaaaaagaaagggaaggcaaagtggtaatatatttttcctagtgaggttttgcctctttattcagggatggaaaccttccccagaagcttttgtctacacttattggccagaaatttaacatataaccattcattgctgtcagaggtgggaaggagtccctgagaaagaaattattcttgttttccagcctctattgtagcatttaacaaggaagaatgggattatgaatagctttggaatgtttatcatgtcttctagttgccatagctcatagtcattttatatgattgaatctatattaggccttttatctgacaagtttcccaatgtacaaagactgaaaaaaaataattttcctcagatgggaataaagaatgtcaactggtctggccaagtgagtttggaaagctaagatttagccttgggtgcattattgatggacaataaaggagtaggtggcactcatccattcattcagttattctagctgtgctattgaatacttgctaactgcaaagcacagagctagatcctagtaagaatatagaaaagaaagtcacagtctctgccttgaaaacatatttattttatttctaggacaagacatctacacatatacaaactgtcaattcataacatgtcatggaaacataaaagaaggtatcagtgaaagtggagtgtttaaggaaatttccatgcagttgatagaattttaatcctataatttcaataggtagtagctgtgtctcaggcattctaggcagtgcacagcaagagaaaagattgagataaagataaaaactggaaagaagtaggcaatcagtcatatttctgcaaagcaatgttagaaaattgcatgtgttagcttgtatacacaacttagcttacaatgttagcttgtagctaactgaatacagatgtgagagttaaaatatactctcctaacagtagaataatgattgttagagtggcagggatgatcttatagaaataaacattggacaaccagcaaaaacagtgaaagccagccatatggctatctggaggaagagcattccagctactcaaatccaaagtggtatcatggtgtgatgtctttttttttatttttgttttagagacagggtctcactatattccccaggctggtttcaaactcctgagctcctgtgattctcctgcctcagcctcctgagtatagtcacatgccaccatgcccagctaagttatatataaacataagcacagagtaacatggtagcaaaaaataatgtcacccaaattagggttttgaagacaatacaggagttagatagataaagaagagagggaagggcataacacaaaggaacaggaagtattaaaatgtgcgtgttatggacttgcatacaaattgagtgctttaattttgccaagcatctttcataacactataaggaattaacagtatgagatagcataagtaagggggcctgagaacttacataaacacccttggtacatggaaagtaaatataaaatggtgctgataattctaattacatagtttatagaaaagatacatgaccaagcttgaagcaagaatgattgataaggaattaggtaggttctgtataaggaaaggtgatttcagatcccaaaagggcatggctgaatgtttagcctttcagagttggggaatccatttcttcctgtggaaggattagtctttaggtgaatagatatgtatcgaagggaaattaagagagcataagaaaaccccactttacctgccatctatccatggaagcagcaataagaccacctgagagctatggtacaattaaattgaagatatttgaacacataaagtaggtgtaatgtaacatataggctcaaacatttgaaagtgatgatatttggtcattgctggcctacaaaagaaatgattttatgtgattcagtctaatggtaatagttacaaaggattgacttcttcgcaaataaaatggttgaaatagtacccaaaactagcagattgggcaaaaattacaaagaaatatctaagtggttgcatagtaaccacaaaaatgaacacacttattttcagagttcaaaccgtggtagatttgagagtatgtttggaaatgactaatgcttagtgttgtttaccctgtcaccacattcctgcataaggctctttatctctgactggtcatgctcacatctgttttctgccagccttttctggtgcccgcaggcacccacctgcacccaatgtcctccttttatgctttctggcctcctttcatgtactgtgtggtccaccatactacctaatctgctatatactcacaaaactatttacttcttttgaaaaaaatgtattattagatttaaatatatgtatttatatttcccttcactttttaaagttttcactttatttttatactatgttttaagcttccctaatatcccactgctgaatcccaccgacatggaatccacggcatggtgaatccctgacttacccattcctactagaagtagagccagaatctaatccagacctcctgccagccactcccagaccccttctttcccccaaagaaaatgaagaacatattttttgtgcaaagagatacaatcaggaaatttttttaaaatcagcttttattttaactgaatagcttacttagtcctggggctgtaaagtcaactgaatgatggagtcatttttttcaaaatgcgacatcttcttacccacttctcttattactctcatcattatgaaaatcacatttgtgaaaggaaatgaatttatatcaggttttctttggcatcacccaaaggaccttagtaaagaaaattaatactaattttattttctattgtgagcaccttaatacggaactgtaagaataattactatttttaatgccaaatgaagcatgtaagtattactagcttcttttttgtattaacttctatacttatctcaggagtttttatagtgatatagacattttgtgaaatagatcatgagtgaaacatagacctggtatagcttgactggggcctactttacagatttgtccttaagtactgaatataaatgtttctgcttcttattttccttagcatttttaaagaaagtcctggaagccaaaaatctccatgatgaaatatttataattattaatcactgttatatgaccttattatgtatgaaaactatattcaacatcctaaatatgaaatgtgattagttctgattttaaagatttgtgataaaacaagacaccattgatgaaatacatagaaaaaggaagacaaaatagcttgggacacattaataacttacacaaaaaattttaaaaattaaatcttctaatagatttgatatataatataccccagaaatatttacattatattttcaaagtctagagcatttcttccatagactccaaaactatttgtatatattatcatcgaaacacaattttgagagaagttggaatggcagtgcagttagcagataaaaaaaatacccacttttctttacaagtctctatctaattcatactccctattgctctttcctgcttcacaaacttcttaaaagattttttcatgtggtgtgaatatttaaaatctgtcttagcaattttcaaatatacaatatagctggccatctgtatttgtgggttttgcatcctctgattcagccaaccatggattgaaaatattaggaaaaaatgacgaaatacaacaatacatcataaaaataatacaacttaaaagacaatacagtataacaactatttacatagcatttattttgcattaagtattataagtaatctaaagatgatttaaggtatatgggaaaatatacttaggtgatgtacaaaaactttaatcatttcatagtgtatacatatatcaaaatgtcacattgtaccttataaatactcataatcatttgtcaattaaaaataatttaaattttttgaaatgtaaaaaaaaaaaatttttctagcctcccagtctacactctcacttttcactaacccatttactgctttcttgcttgttctcccagcacaccacaaaaacaacttccatgcatacaccagtatcacccccctcacccccctgtttccaataaattaaacccaatggaccaagctaaagcatttattatacttcacctctcagaggcatttaacgctattgacaacttccttcttttcaaaaccctgtcctcccctaattttcatgaaacatgaaactaccttctagttctcttatttatctcagccatctggctcctctttctctattcccttgttacctattggtgttggtatgtattccattctagaactttgtctcctctactgtgatgctatcatttagggtgaaatcaactactcccattgcttaatttgtcttttataaatttgtgacttctacatctatagctccagttctgctgtcttttttgtattaaagaccaatttctccaactatgcactagacacttccaactagtatcccactggtatctcaaattcaacattattgaactcaaaaacttcttttgttaacttgccttgctgtcatatttcctgtattggtgaattatatcagcttccatagacttgcctgagccaatataacctaggacatattctccttttcccttaactcagcattgactgacaaagaacatgctaggaagtctgtattcttcatgtcttaaaatattcacctctgcttccattgccacagctttgatttgggccactcacatttctgcagtagtctctgagattgttatcatccatatctctgcatttttcttgctaatgagaccttcattaaaattattttgtaagtatttaattatttagcagttcatgcctttccatatgacttaaaattccattgggttttgcttttttcctgtaacctaaagttacatctgggttggtcaaagtgaagcatagtaactacattccctttgatagtgctgcaattaagaccaatgaaatgtgaaggagttttagggaagctttttcctcagtcttaaaaagagacaaaaggaaacaatacccctctcctgtctctggttcatatttgatgagaatgtggcacctagtctttttgagaccagtggggtagttaggcccacaccctgtggatgtcagagcaaaaatatggaaggaatctgggtcctgataccatcatcaaaccattgagctaattccgttttgtaagataataaattccttactgtttactctgttcgagttccttttttttctgttagttgtagctgaaaccattttaactgttgttttttgtttggtttggttttgtttaatacggagtcttgctctgttgcccaggctggagtgcagaggcgccatctgggctccctgcaacctccacctccagggttcaagcgactctcctgtctcagtctcccaagtagctgggattacaggtgcacgccaccatgcccagctattttttttttttttgtatttttttgcatttttagtagagatggggtttcaccatgttggccaggctagtctagaattcctgatctctggtgatctaccaatcttggctacccaaagtgctgggattacaacccactgtgcccagcaccattttaactgtattctaaaagcattttacagcctgctaatacataacctcatctccaaccttgcttcctaagttccactctgtgttccacaaatgggattaatcacctactgaaagctctataataattcctgtcacctgaggatattgttaaaacttctcagtttgtagaagagggccttcattatcagcatcacatttattttccagaaagatatctagcacccctctaccttacatcttgcttttcagccaggaagaacaactttttctttctgaaatgtactagaatctcagtgttgggccacattgcttttttttttctaaaagactaatcgtcttcctttcccacctaactcaaacatatccctcttaacttagacattacttattttggggaagtcttccatgattaccctaagaatagggtaggcattctttctctctgcttccatagaaagtaggaaactattgcacttactcattgtaatgtggctatattttgatcaaaataattaaaaaatactgtgtggattcaaatttttctcagctactcacaagctgaatgatctcacacaagttatttattgcaccttattgtgctttctttttctctgaaatagaggtaataattatacatacttcatattattacaatgattcaggaagctaatgtatatggtatacttacatatatatatgacctagtataacgcatgatacataataagtgctgtgtacatgctcagtcaaataatggtcatttgaaaacatttattgagtaaatgaagaggaaagtgtttattttcaatacattcaaagatattgttttggttatttccattacagaggcataatcagtttactattcagaaaaatgcaagagtacatttttactgctcctccagtgatactatggaaaacaatgttttagaaaaataaagaaggtgtgaataatgattaaagaatcatacactctcaaagtgaaacaatttcccaagaaatgcggtagaataagccttttggtttctgattttttttcttaactttgcttgtatgttgtagaaagctaatctaaatttaagaaattgaaattttgaagtattaataatgtacttctctcccaaaattgttttaatgtaatgatttttgccatatggatgaattatatatgcatctagaggctaaaaaccataaaaacaagcttcttcttagtagacttttgttgtttattttgtacagcataaagcagcagtcaaaaagttttccaaacaaattatcttatgtattttgactaaacccagatttatcttcttaaaatgaagacctttgttgtagttgcatttgttcctcatatgcagtagaatgacccagcctctttggcttagaggtagtgcctcctttttacgacacttggagcggcatctgatgctcatcacttcagttggataaggaatgctgtccagtcacagagactcatgagatcatgtccaatgaaggcatttaacaataaattcacaactagtgagtgagaattttataaagcagtttcaagtattaagtagataggtaggtaagctttattatattttttaaatgtgaaattttacaattgtgaaaatttacaattttacaattttacaatgtcaggatggataacattgcctttttagtaatggtagccttcactatctgcattatgactgtacaataataacatataataatatatatagcatatatattttatatatataacataatatataacatatataataacatataattataacataataactggggctatgattgcaaacatttataagatgtggtatgaaaatgtcccaatcacaaaaacactcaatttaaaaatgaaagaaaatgaatctatgctatgctttgcttcatctttctctgaactagttacaaacaaaccttttaaaaataagctttcaatttgggaataattttagatttacagaaaagttgcaaagatagtaaggaaagtccccatttgctcttcatttggcttcctctaatattaacatttgccaaggttacatttgttaaaactaagaagtaaccatgggtacaatgctattaaccaaattacagctttcatttgaattttgcccatttttccaatattgttcttttcctgctacagcatccaatctaggacctcatgttgcatttatttcttatgcatctttagtcccctaggatttgtgacggttttctgtcttttttcttttgaagactgttcattgcctctgttagtttaatgatcctctgagatgttattcacagtaaaatagcatgtgaatttcacctaactaaaaagtttatttgatccaaagccctgattttaagaatttgaaagaaaaaaatgactctatttttcccagttctaaacattttactagaataataattgtattctttcaacatggaattaatgttgatgagaagcaaacatctaaatttaaaagaaaatatagtttgttgagggaggtaatagacaataaaatgtatttattatagaaaaaattcccaaaactttctcattaaatgtgctttatctttacttcattactaatatttagcttttattcttttaaaaagcatatgccaatgataatatctcattaataataagaatccatctaattttagcttgatcttccccctgactaggtttgattggattaaatcatcataaagagacaaaataatgcaaaaagtgataaatctataagcctcccctaaggtttcccatagaatgatcaacccaaatgtgctctttattttatgccatgaaatgacatactgtgtcaagaactgaatttcatcatacatgagacgtaagactatttttatatctctgtaaattgggtatgaattataaaagtatgctggtaaactgatcacttgagaacataaagtcaactttccctggaagagtttctcattataaaagaaaggcaagcatcttcttcctaatatctagctttatcaggtcaggggctatattctcggaagggataagtaatttctgttgtatctactaatttcatttaaaaagataactagagaatattggaagcattattgtagaactgtgtcaaagaccgaaatatcattcctaccttagactgtacctcaagatcgaagctctggatgctatctggaattaaaatgtttgcattaagtttaaaactcagtaaaataaatgtttgaaatgaaaaccagaccaataatgaataattttacttagacctactctccaaatgtgctaaaagacttgtaaaagttgttgttgttttaataactaagtcaagccagttttatttaattcaatacatggagtattaatgcgctgtatgaatgccgaaggtagtattggacgccacaatctttaggaaccatgcttctgagttttaaaatggtgactagtttagcatagattcaacataagcattaggtgttcttttgacatttgggaatcagccaatcaacaggaggaatagtaaattgaatacgaacttgaaagagaccatgtctttttttcatccaactgtgaaaaactttctttgtacaattgttaaacttaagaaacagatggtagatctgtatcagtcagtgaggggtttctgaagtacttttctggatgaatgccaagaaaatgggtttctgagacttgcatggctctggatttgttctgagctgtttagtgaagtgagggctggcattcagaacccaggggagggggagtagtcattcccattgccttgcatagagatagaatcacaggtgacaggtcattggaaaatcacttcttgagagtgggtatctttattttgagttggtatctttttgagagttggccactcataagccttgcttttgataacatttctttaaattcctccaaggaacaaggggaagtgcaaaaggaatacgataaagtgcagcattgaatgagataagcatattcaacttaaggggcacactaaatactgtaatctgggagcataactcagatttcttttcttctttgctcagtataagttgcatgatcatagaagatttatgtagaagtcagaaatcaaggtcaagagggtaggcatatttagattcttaccctattcataattaacaataaaataagattttgtgtcctgattcagagaatggatggctcagtccttataacctcttaaattagttttatctataactggatttctgaatctcttttgaaaattactaccattgatggtcactgagtgaaaaaagcagaaggatagactggtgttaactgtaatgaacatttatccaacattacccgtgggcctgctatccattttaaattctaaaagcactttacagcttgctaatacatagcctcatctccaaccttgcattcctaagttccactctgcattccacaaatgggattaatcacctactgaaagctctataataattcctgtcacctggggataatgttaaaacttctcagtttgtgagagagggccttcattatcagtgtcacatttattttccagaaagatttctagcacccctctaccttacatcttgcttttcagccaggaagaacaacttttactttctgaaatgtactagattctcaatgttgggccacattgctattttttttttttctaaaagactcatcatcttcctttcctacctaactcaaacatatccctcttaacttagacattacttattttgggggagtcttccatgattaccctaagaatagggtaagcattcttcctccctgcttccatagaaagtaggaaactattgcacttacacattgtaatgtggctatagtatgatcaaaataattaaatctaaacaatactgtgtggattcaaatttttctcagctactcacaagctgctatccattttaccaagcctcctgcatgtattactatgtctaatcctcatatcaactcatatataaactagattttatgattatggctctaaaaacaaggagactaaacctcggaaatatcatttaacctgtacaagaccttacttggctgagctaggattcaaaactaggtcattccgaggagaatataaagtccagcttttttttttccacacagggatgtatatttccaggtacagttttacattttgttctttattgtatgaacataaatatagatacatatgaaaattcgaaagcacatgaaagtgccaagaggaaatgcaataccatcttatgaaatgagaaattacacatatcttacagtgagtttcaaaattatattgctcaaagtatttttactgtggaaccataggcacaaactatagcaagagtaaatccaaaaatgtttattgttcttctataaactaactactgtgtaggatacaagggatgctgatttcaccagtgcctttaagaaggacaaatcaaattaaaaagtcaaaatgactgaaggtgataatccagatggtggtaacaataatgactaccatttatagaactttttgatgttgttcactcaacgtttctatttttattcaattataagcaaacagcagaattaacccaacattcagcaactccagatcagcttttcttacccccatgaagagctatcaatttaacaaccacagttgtaaggattcttaataagctgtcaatgagcactgctgccggtctagatggccatgccccaacaaaagcaaagccactctccctaatgctttttccaggattgctttttaaaggcaccagagcgagatactgacgcctattaaggcatctgagatgcaccgtgttggggtttagcctccatgccagccagcctctggttgtctaggtgagcgacagcaccataaaaacacgctgcgtacaattctggtattaggatcacaaaggcagagaggtgacaaatcctttttctttttctttttttttttgtaacctcccttaaagattctttgatgctttgctctattactgtgggcctggtctttttttcccccccagttttttcttctttaaactctggattgctattttcatattaatttgatgaccccatcacagtaccagaatattcctgaaaatagagttccaatttgatcaaaacataaaccagagtgagtgagtgagtgactagaattataaaggccaggcagcaggaaaagttaccctaaaccatctgactgctcaggtcttgcatgtgcaaaggggagccggaagaggagaaatctattatacatgcaacactgaactggagaacacggcttggggcctctgggacagttcaggtccctgagctgccccctacttcccagacagctgctcctgcagtttgggcacatagtcgtcccactcagcctggtaacgctttctggccactggggccacgagcacgagctcgtacttttttttttttttttttgagacggagtctcgccttgtcgccaggctggagtgcagtggcctgatctcgcctcactgcaacctctgcctcccgggttcaagcaattctcctgcttcagcctcccgagtagctgggactaaagccgtgccaccacgcccagctattttttttttttttttttttgtatttttgtatttttagtagagacggggttttaccatgttggccagcatggtcttgatttcctgacctcgtgatccacccgcccccgtgatccacccgccccagcctcccaaagtgctgggattacaggagtgagccaccttgcccggccaagctcgaacttttgacagaaggatgccattttgaatttgccactgtggcctccagatccattgctgaggatgggctcgtcacacttcagcagcctgtcctgtttgtaaaccagccagacatagcggtggagatctgtgccctccggaggcccgagcccacgtaatggagatgactgggccactgctaacgtcattacccttcatgttgaccaccaggaaatgacgccattcagtgtattggggcttcttcctgccgggagcgtccgggtctgttaggaccaaggtgtagagtttccttgactcaagatcatcccatgaaatgctggtgggtctgttaacctaggtgggcgtcagcactttgcccagctcgtccaccgtcgccctggcgtaggcgacatgcagcgagtgctgcggctgcccgtccacttcctgcaggctcaagggcctggaccgcttgctgaggtccctggcatggctgtgcaagaacgcagcgcgcagctgggagtgccactaggcaaggcgcaggcgcagcggcgactcggcagcctctgaaaactagccagggaagccggggctcatttataggattttaaaaatattattaaaggcttcacaaactgtcttgtttaatagccacaacattgggaggccgaggcaggcggattacctaaggacggagttcgagaccagcctggacaacatggtgaagccccgtctctactgaaaatacaaatattagccgggtgtagtggcgcatgtttgtaatcccatatactcaggaggctgaggcaggagaaccgcgtgaacccggcaggcggaggttgcagtgagctgagatagtgccacggcactccagcctgggccacagagcaaaactctctcagaaaaaaaaaaaaaaatagatacaacaatctccttttaactgaagaggaatgatgtaaagttatataaagttcagaggaattgatgtaaagtgaatcgtaaagactttggaatctcctactaaaatattttaacaggaaagagacacatcagtgcattttacaagcagatcaatgtggcggtatctagcatgcatggggaagggatggaggaagttgtcagtttagaaactgagtataaacattattgaaataggacatgataagtacctggaccagggtaaaggcaatggaaaggaaaaggaagccacagaccacagataggaggaattcaaggactgtgtaccgaaattcaggagaatgatgtgaaatagatgctctgaatcctctattcccaggaggcagcattatggagttaggagaaaatgcaggagctttggattctagtagacctgggattgagtttttacactgttactctatattcgaagcaatatatttaaaccagctgtgtcttccttttgtcctttataaaacaagaataataatgcttatcacatagagatattatgaggattgtataagacaatgtatcaaatagtaggtattcggtaaatgttccttctttactaaagatagagaaaccattttctgatgtacaaagggatgaagagctggcccaatatgaattttcccaaagaagttaaatgaaaaggatctcatgatccttttcaggatttattatttacgaatgttaatatattattttaatattttctatcttatgaaataattatttggtcaaaacataagacaattgataggaatatacagcatggaaaatggttaccaactagagctgcagggtatcagggaatgtgacaaggcagcaaaatgtttctacacatgtctgttttttcaggcattatctttcttgagactatcaagtgtgtatttaaggagccattcaacttacttcagtgcatttgcttgcaaagggtgcaatgtgatgtttcctactggtagggtcgtatttcatatgtggtgatagtgttgctgaacaaataggaaatatccttgcctagactatattttatcatttcattatctagtggtaaaggaatgtgagttctatttacaaataaacattttgtcttacttttttctttgtgatctattttctccaagttgcataatgtaatgaattaataaagcttagttgctggccaaatcaatggtgactttttatgtttttaaatataatattaggtttaacttatttttgtcattaaaatatcatttgtgagtgcttttcaaaatgaagtgcttctgaaataaatcacataataaaactaaccttacttttgaaatacatttttattgaagcaaacacaaatcaatctgaaattcagcattttgtagcagttaaatgtatagtcaggcagcttcaacgtcaactagagaagttgtggttttaaccccgagatagggctgattatgctggtgctatggcaacctattgcaccatttggtagcgcctgtgtgcttaaccgcatgagctgcgcctcttcctttcctataaagactcagaataagaaaaacagaagtacaccgaagagaagaaaccacaagagcagtaaagacactgctgttagcttttagctgtgcaaacagcagtcttatgagaacaacacattgaaaacctcttctatttgaaagtgtagcttttcccattatgcctgggttcctttaatgattttgaaagtaagccaagtgtttctgttcagagttttcattaaagggaaataagaagaaataagcagtgcatttatcagcctttgcttttattgtcctcagctttaggagtgggaggcttttgtgcagcctcagcagacattttattctgtttgtgagatgggagattagtttctattaggtggactccctataatctagcatttattttctgcttttttttattatattgtagttagttcacaaaaaaaagtacaattttaattcatctcctggctcatttagaaagggttgtggttggtgctgtaaacacgtttctacataactagattaaattcacagacactcactgtcctagcactgtttattttctatggggagcttcatttacctattctttccctcaccccacttcttttacaaggtataggttgatcagcaaaggcttttgtatgttttcctttgtttcaaagtacagacataatataatcataacttttttttgcatgttctactatttttccttccttaaagatttgggtaaaaatactgaaggacagacaagttcatgctaccatttttgttaggcataggcctgttcacttttcttcccatttttctgaaaaataagaatctaccccttttgtagtcattgtccagcaatttacactttttaacaataagttttaatgtgtggtactctgaatcccattttgatggttatacataatatttactcatttttgagtccctaatagctctttagcacaaatactggatttagcattaaatattttttccttacagtgcaatgcagttgaacaagcatgggggtttttacagtcagacagatctgcatttaaatctagactcattttgctacaagttctttatttagccttgcatacacgtttttatgattttgagctttcatctgtgaaaagaagagaataccatctactttgtaggatttctataatgattagataaaataatatgtaacagtatttaggacagtgccattcacatagtacccgcttattaaatagtaaacactgttgatagcaccaaatacactaataaaagatttcaccacttatgcaaacatcttttgatgattctttgttctttaatgatgatcgtaacctatcctagaggaagcaaagagctacaaaaacatacacttactaagggattaatataattaaatggtttttgctatctgaagtatattgcataaatcaggtatatatccctggatttaggtaaatgaaaacagacattttcataagaagcaaaaagataattaatatgggaacaaacctattctggaaaatgtttaaaaagagaatatgggtaaggaagcatctttctcagttgttcttaacccttgtttccatcataatcaccatcagagctttaagaaaataccagtgcacagatcacgttaccccacaaacctactaaatcagattttccagcgctggagcccagaaatagtcacctttaatctaattcccagtcaggattaatacaaataaaggattgatattttttcttcctcaggataataatactggttacacacacataaatatacataactgataacaagccagaattttgtaaactatgttctcagaaacattgcagttacattgtacaaatgtcctatagtatgtccatgggaaaaaaatgggtttgtggcaaatacttttaggagatcttgagctaaacgaagtgacataagtttctatgcttttaatatattaacacactttataaatatctcaaaagggcatgtagcatgaattacttctgaaacaaatttgactatgggacatttaaaggcacacaaatctaaatcaaagacttcaatttgaccatcattgcacaggaagcgataaaattttccccctgacttgtagataaatagtttaagacagaaaaaaagcagtgtaactgattgttcttaaatggttatctagtagcctttattaatttttttgtcattaattgtttcgttaatcaacatgcctgaaatatataacatgatgttttaaaccaaatataaaatacctacaaatgcattcctagttttgaggtgtgtgtttgcaaagtcatatgtattcacaagcaaaaaacattattgtaaatattggacaccataagtcattgggagacagctagatatggttgctatctttaaaattttttaattatttgattttattcctctcatggccacaaaaatttgccttctttatcctcaatactgctttacatactgatatttttctttattatttgcattattatttaaaagtgtgtatataatttgaaagtttaaatagtaccataaggcctagagtaagtaagaacagtcttttgctcccacgactctcccctcccttgatattttgtgatttttaaatgttatcttttattgtagtgctgtttctttaaaacaaaaaaaaagatttttgccagtatctattgacttcttctcttgatcttgagatgttgctttttataacctcttgctctttgttcatgggtgcaatgttttctcatttctgaaaatatgaattgtagttggttatcctctcttttgctccttgcattgcctcattctcccaagtgcctcttttgtttatttgagctctatctttctttcttattagaggctttgttctagtgtttcttggatgtccatttgtatttaataaaaggcctcaataaagggatgttgaaattctttggacattggtggagctcataaattcatgtgctttaactagattgaatgaaatcagaaaggcactacactcactgagtcttagtttccttatatatcaaatgaactgcatgtcaataatcactaaaatcctttgcttctgtctgagtagaaatctttggaattattttctgatgataagcagaaagtcctttactcatgagattccaaaaataatattaatatacccaatattttaacataacgtctacataaagaataagaaaattattaaatagacactatttcaaatctagcactttcctcgtgtgtgcctgtgagcaatttactaaactcttttaggtcccagtttcattccctataaaaaaggataaataatgctaactcattggcttactgggatgcttaaaagaaaaaaaatacatatatattatataaagaggtgtgcatagtgtctgctacataacatttcagtaaactgttgccatcattattatatttactgataagctaatggagggtagaaaagactgtttcctgtggttctctgaaatcataatacctggcttgtcgctgcccagagtgcttactccataaatacttaataatttaatatgatttgttagatttattgtctgtggaccatatagcagatttctagcataaaaaaagtgcaattctcttatttttattgtgcactttattattatcatgcattgctaagaaaggaaagccatacatatctgttttagctgacccttattttttgtcttgatttgcttttttccacttttgtacaggctttatgtttatggaggtcaagtatgcattctcaaccttcaaaacatgctatcattcattttagggcagatgctgagaataagtatttatttaatctattctattttacccttctgcccttgtacttttcccagatttgcagaactagacaggtttaaattccctaggaaatagcatcccatttttttttcttttttttttagcggggagggagaacgggtgatatttaaagcccaagtatgtcttttgaaatgccgttttcactcaaattgattcctagtttttgctgaaatctctgatcagggacttaggggtgtgacttcaaggtaactttgatttgtgatcatttaaacattttgagttgtaaaagaaacatattgggaaaggtaaattcagtaacaatacatgtgttagaataacacagctttgaagatcaagtgttctgttatctacattttcatctgtttaatgtatctagtcaattccattggtgattcacaacaggattataatgggaaaaagagctcttagataatttacagttttttagtgctatggtgccacctactgaaatattactaaatactcctttgactaaataatgaaaacacaagacatttaagttttaaaaaatgtagaaaatttcatccctagaagataaaagtcaaagtgtagaatgtagtaactgtaatatgtggaacactagatatattactgtgttttattttatatttatttgatgtgtttatagaatttgagagaaagctcaatgcagttcttactttgagaaatagtgatgccttctctttattgtcacacacctacacatgtgccctcttaatttccattgctatgtcacatattttgctttacctattttccacactttcccagtattgttcataaagaatgtttacatatattgtagtgtaatttgtattaaacaatctccaaatattaaatatttattgtgcactggttataaaatactttatgcaaaaattttgtttgcttttcccagatctatttgactccactaagaatatattgttgcttttaagtaatacaggaaatagggtagagtacaaggctgtctacatacataaaacaacttaggtaactacatcagttcatttgttttgcattggacaagcacagtaatatttaaccatatactccagtctaaatggataggtcatgaagtagttaaatatgttatacaaccaatcttttgttgttgttgttgttgttgttgtttttgagtcagggtctcaccctgtcacccaggctggagtacagtggcaccatcacatctcactacagcctcaacacacactcatgggcgtagcctcccaagtagctgggactataggtgtgcaccaccctacccggataatttttgtattttaagtagagacgaggttttgcatgtttcccagactggattgcttggttcaagcgatccagctgcctctccctcccaaagttctgggattacaggtgtgaaccattgcacctggccacaaccaatctcatcaggtcttttttttctatcagtgaagattcagcacagtggcttctatctatgattttggtaatgtttaataatgtttgcacatatgaagtgcaacagacaattgaagtcattgctcatgtaatttaggaagaattaaaatatgatagagaattaataaattattgcagatatttggttttatagttttctctaaatagttaagtaccttcacctactccctaccttgtttcatatataaaggcattctccaccaaagtatttgttagtgttctgctaacgttgatgtaaaaatcattagatgactgggggggcggggtgtggggaatgtcctttagatgttacgtaggtgttttaactaagctattttatataggtcacatttagcgtgttcctactttaagactggtaaaatgtttaacattaaaaagactgaaaaatagatttatgtaatctagtgcacatggcttattaaaattgatatgttgctttaagttgcatcactctagtgcataccttatttccttaggggcattggcttaaattttaaagtagtttttaatttaaaatttttattttaaatagattctatgtgtttttttcaggcacgaaaacatttttatgtcatttatcatgttgactaaaagtgttaccaaaactaaaaatctgtttatagggattttatgaccatgagaacaagcaagttgagtcttacactaagtctaaacagtgatgctgaagtcttggaattttcttttaaaaagataaaatggtgtgtggggtgtgtgtgtgtgtgtgtgtctgtgtgtgtgtgcacgcacatatttgaaatagtatataaaaatgaaataaaacatagattacaatgttttagtgtcacctaaaaatcactcagtggaggaatttagaatcatatccagtgataaatcagtgtacaagcaaacacatattcaattcaagaggcctttatgggaagtaagcatgaacatagaagaaaggaaaatgttggctctttagatattatactgttttccaggatattaaattttgctgcattaaagatgaaaagattcgaggaaattttgaatatggagcgatgatgagatcagaaaaaaatgtatatgtatgcccattattctgtcctctagctccagaaacctcttaacatctaaacaaaaggtctgtaaattttaataattgtgcttgatattagtgtagtttggttgactttcctgtcaaaatagtattctgtaataaattaacttgacacacctctaaattttctctaatatttgtttgtaccattatagagcattcactcagcacattgtgatttaatctgcatatctatttttagggtcaaggttattttagcatttgtagcactactagtaatttacttgcagccaaattatgattaagatgcatttttacttagctcatgagtttttaataaacaccttctgtaaaagaattctcatgcttaaaatttcatatgaagaggaaaggctgtaaggacaagttgatgggaaaaggggacgcctgatgaatgagagcatggcctgtaaagtcagacaggctcaggttcaagtctggctcacatatactagactggccttgtgaacttggccaagacacttgacttttctaagcttcttagggtttttgtggtgcttaagaaagaaaacataagcaaaagacttagtatagtgcctggcacccagtaaacactcaataaatattaacaattaataacaataaaatattatttctaaattattctttaaaaaagtaaatcattagaaacagtcttctccgttttggtaatttacctcttgtccttcttttcagaagttagattaaaataatatacatcatgtatttcttttaaaaaacgtattgcctttggaccacttggaagtttattaatctctctgagacatggaacatatacgtagtctgatgaatagtgtactggttggaaacagttctagtatatttactcaggcattcacagttcttttgttaaaaaacaaatagcttcacatagtgtcccagcatttttcttctcatttctgtggtaaacagatgatgaattataattttcttttatgaaactctatctatagttggtgctacacattttggtgacaacaaagtagtaaatcagaacaacagaatataggggtctgtggaattagtggtgcaggtaacattaagatttctcttttctctgtcatcaaatttgctttctgatttctcctctgtattaactgatccaatggcttccgtcattctgaggaaaaagttcaagctccttttcaaggcctacagtgcttgctccttggctcttctcctaaagctgttatcatcagatctgtttgatttctcctttgcacttactcatgcttaaaagaatccagcaattacttatcaatcacttcttatacacaagactctttgctacagctatttctctttcttctcctcctcttcctcatcttattatgtgattcatgctgatgttgatgcgagaaattttgattattagtcttaatcaggtgtatccatgactaaaatgtcattgcagatgactagatatatgtgttttatgggttataagcttatccagggcaagggtcatgcttttatcatgtttgaacctagtctccaacagcataccagcaaaacaatgtatgtttcttgaacctaagtgaactaaattaacttgtttcaagttccaaggaatgaggtgcttgcatgagaaggggcatatcaacctaattttagatatgtaagagctcatgtatttctcagataaagaagagatatgtgttgtataaagtatgttcacacactcaaaaacaatttgaatattttaaatttggtgatatgttttgttcttcacaaacaatgaaggacacttttcctttcacttcaaacatgagagctattagttattgctatactaatatttttttcttattacctcttttgcaaatcaacacaattctaagactgtaatttacaaggaaataagaacaaataaggagagcggaatgctgttaatgggaacataaacataacaatagtttacatgaaacagaaagataaaagctaactagataagaaaagggacaaaagtacaaacaatatcaattaaaaacaatatttaagtatgaattattaagaaaaagagaaatgtaatgagaaaacaagaaagtcattatgttaataattatgtatcacccatcaatgatataaaaatatatatatcaaaaatgcattttacttcaaggaataagccagggaatgtcattgaagaatacggggtgatgctccttggatggcaactctgaaggaagaaaatgttttcacatcagtttgttctcagaagataaaatataaaggcagaaagtcaccttaagtaccagctaattcactttcccatctgatctctgattctctttaacaacctgagtttacagtcatttggaaaagaactttacaatcttttaaataggcatttactaagatgagggatgaaaacattgcacttcactgtagactgaatctagttcccatcatgccaagaaagctgctcttttcaacatttccacaaacccagatgataaatccagttgacccatgttaatgcaccatgtttatcctgcatgtgaatccccatattatttgacttcaaccatttccttctcgaaacaccctctactctttattcttgtttgctacagttttcctcttacttggaaaatttgattacctatgctggctctctccttaatattcactgaacttcaggattctatcctggacacttctcttttatgtagttcggtgatctccttcacctctgtagctgcaaaatgtatctatatgctgatctatagcatcagcccagatgtatgtcatgagctacaaacctctatattcaaatgctattatacattttcacatgaaatctcaagcaaattctgattcacctctctactcactgtttattactctcaagttcagtgaaactataactcactagcatgttaaactatcaatctagatattttccttattactctttctcctttattctcacttgaaaggatttacaaagtcttggtgattcttgagtgtttcataggtccttttcccccaacctttcttttggggtatactcttcctacgtaggacatcatctctgtctgttttgctttggttttggtctcctgattttcctgcccccacctttgctctttaataatccattttccatttcctgaaaggttgatctaaaattcaaatgtttctcctttaggcctccctttaaagacatccctttaatggatatctaaagcctgtaagataaatcccagcttcttattcttctgggaccaagctagctatatgcaatcctttaggttgtagcttaaatacatccaagaaaccctctgtatcaactcctttaccagccaaccaccaactctggaaatataaataagatgatcctgttatgttctcctttagcacattctgtatcacctgtcatcacactgtattgattgattgtttttgtttatatctcacactaaattgagctcattgagggcagggaatttttatatgttggtcatattatatccctagcatgtggcataatgtctagcacaaaataggtgctcaattaatcatcattatctaaataaataatgcatttgggaaaaaaaagtttcaaaagtttttcaaaagtcttttgcaggcttgaaattaatcccaatagtgatcctttagtctgttatgtttctgatttagcctggggattcaaaaaataaataacataattttgatatatttgggctttgtaaacatggtactaagagaggaaatatagtttcattagggtaaaagctactgaaaattgccacttggtgaatgttctatcatagacttgaggtacatataaaaatctaatatatgtttacattaatatgaatgaaatttgaaattttctaagagatttttgtttcttctttgcagggcaaagcccaacaccttcccccactggtaagaattaatatttatatttttactaattttattttcttgttgcaaagtttatatatttaactacaattttctattattaacactgaaattatttttaaggataaattttataatcatgagtgattcttgacattcacttgttcttaaactttctgcttatacgttatagagtttaataactacctaaacatgttattaaatttgtatatatattttgtgtataaatagtaacttttcccaaacttgacagtaaatcacacaacaggtttctactctcttttaatattttaagactataaaaaaatgcatttaaattagataacaaaattttatagtctgaaagcaggttaacagctgtctatgtatgttatagatatgtagataacagatttgcatatgtctatatttctttaagagtatgttgcttttttcaatggtatgcaaaacctttgagactattgagatatttttaaataataattttcaaattctactgaacacttcaatagtccttataaatgtcttaatcatgagataaatttaaaacacagagatgctgcaaataaattcatacatagtacatacaaaataagagaaaaaattaaattgcagatggttaaatatcacatcacttaactgatgttactgaaaatgtattttcctgcataatcatatggttgacagtatgcattaagaaggtaagtaaaacaatgaagacaattttgatttaatatggtaatgcacaattccaactaacgtacattcaacagatcatgaaattgggttattaaaatgaatatttttgtcattaaataaaaattccgtccaaatgaagaaaacaaataaccatgaaaatagtaacaaaaacacttctgaatctgcataagaactatatttccttatttttaaagaaggtctaacacaattttacagcgtttagcatggcagtgatgttttataaataaataaaagtcattcttgcatagtagattgtgattggtttatgccagctactcaaatgcaacttagtatctccaacttttacagaagatagattcatctcaaccataccagatggttatttttgcaggaaagggataggtataaggtagaatggggagtgattctttaaaatgacacatgactcatcaccttattgagggagtttctgttatctctgaattgactctattatgacaagcctccaagtgatgaaaccaggtaagttaaaactgttaaccaaaatgcaaaggaaaatggtctctcccaaatattggccacaacaatgtcatcaatggaaaccaggagaatttgcaaagtggaggttcaagaacaatgtggaattggcaattgagtcaggttttctaattttaaattcttatttgtgaaagggaatgtgaactgaacttaagatgtgtgcaaagatatgaaggagagtagttctctgaaaacctttctccctacccctgggactgaatttgcttggctagaagtaatctttaggaatgctactcatcaaaatagcgtggtactatgtattagtctgggttctctagagggacagaactaataggttagatgtgtatatgaggggtagtttatgtgattgacacacaatcacgaggtgaattcccacaataggccatctgcaagctgaggagcaaggaagccaatccaagtcaccaaacctcaaaagtagggaagctgacagttcagccttcagttggtggccaaaggcccgagagcccctcacaaaccactggagtaagtccaagagtccaaaagctgaggaacttggagtctgatgttcaagagcaggaagcagccagcacgagagaaagatgaagaccagaagactcagcaagctcacttctcctaccttcttgtgcctgctttttctagccgtgctggcagttgcttggatgatgcccactcatattgggtgggggtgggggggttggggagggtctgcctcccccagtccactgactcaaatgttaatctcccttggcaatacgctcacaggcacacccaggaacaatactttgcatccttcaatccaatcaagttgacactcaatattaaccatcaaatactattataaggagaatgttgcatgattttccttctagtctgtttgtaattcacatctaatgaaagagtgagagtggacgataaagggaacttgttgaaacatttctctcaaagcaaaagggatcattggaagcaggcagacaccagaattggtttaacctaaaaataacaaattaataattatcaagtctataatgatgacagtgacttaatgtgaatagaaagaattctaaactctctccttccttcctccctcccttctttcctactttctttccactccctttctcccacccccttttcttttcctttcttttctcccaccctctctccctccctttcttttattcaatgcatagtagttgaaaaaatctaaagttagacctgattttacactgaagactagaggtagttactatcctattactgtacttagttggctatgctggcatgtcattatgggtaaaagtttgatggatttatttgtgagttatttggttatgaaaatctagagattgaagtttttcattagaaaataacacacataacaagtctatgatcattttgcatttctgtaatcacagaatagttctgcaatatttcatgtatattggaattgaagttcaattgaattttatctgtatttagtaaaaattaactttagctttgatactaatgaataaagctgggttttttatttatcatactatttccattttcttctctagtaatattgcaattttcattcttaactctttcctgtcctatcatttctactccttttctagtttctctcattctctccctttttccatatttgtgccattgtcttttgcccaatcttgttgaactgatttaattattttttgttgtgtgatatagttcagtttttacctaattaaatatttaaatttttttttttgcttttcaaaaagtaaatatatgttaagcaaaaaaaaaaaaaaaaattaaatacatctttataattccaacctccagagatcacatgagcttttttttttttaacacatttggtatatttttctattcttttattaagaaaatcacttttttcagtaaaagagcattaaaaaaactttaaaggactttaatcaacagtgctgatttgccctgcagaattttttttaccattgtacactcatgtcaactgtgcataaacttatttcactactactttgtcacatattttcctcttcttaaagtaaacttgagctgtggatattatttcagtattttaaattgtatctctttgttatcatgacgtcaaagacatttttgtagactttggttgtttgtaaacctagttgtgagttttgtttttcagtcctttacacacattttcattgctttgtttgcttttaatttattttttaaaaaatccatgaataggccaggcgtggtggctcacgcctgtaatcccagcactttgggaggccgaggcgggtggatcacgaggtcaggagatcgagaccatcctggccaacatggtgaaaccccatctctactaaaagtacaaaaattagctggatgtggtggtgtatgcctgtaatcccagctacttgggtggctgaggcaagagaatcgcttgaaccagggagtcggaggttgcagtgagccaagatcgtgccactgcactccagcctggtgacagagtgagactctgtctcaaaaagaaaatatatatatatatatatagatagatattttttcatggatatatatatatccatgagtaaatggaagttttgtcttttttttcccctggaaccctagccctgctaaaaaccttctaactttacctttctctatccttttctttatctacaactttttaatttttttaatcatctttaccattatgcttcatccttctgaactcaattgctttggataggcgagaagctgctttcaatttcatttccccatttttatctttagctaatgttctgtagcttgttttagatctgtgtctacatattatatgtatctctgtatgcatcaatatttgtatatatgcatgcatatatgtgtatgtatatttatgaatacatatacacaccatatacatacacttatgtatggtgtgtgcatatgtatgtgtagatatatgtacatacacactatagtggactggggagttagtatactgggaggagcatacatttagggtatgattcacatatttattttgtccttctcccattttccattaattaacaggattgactacagcaaagatgcccagtgttccactttcaagtgaccccttacctactcacaccactgcattctcacccgcaagcacctttgaaagagaaaatgacttctcagagaccacaacttctcttagtccagacaatacttccacccaagtatccccggactctttggataatgctagtgcttttaataccacaggttggcacacaaaagttgttaacttaaatatcagggaatgtcatttagaaaattctacagttatcagtacaacttgtctttaaattatttgcacagtttctaagtatgtgattttattcaagtgcagaaattgcaggaaattagtatctgtgaaatatagatcgactgaagtaattaatgcatgttgttagggagtggagagagaaaagaagggaagcaagatctccaaggacaatcaggaggggaaatttgttctagtatcctctgatctatacacactcgccatgattctcccgcttggcttcccgccacctggacagatgagaatttccctagttcagagattatcagttctactctccttggaaggtgtcttaaatgggagtcttcccatttctttgtttcactctagattctctttatccaaaaattgttgaagatagagaatgtattatttttaaatccactctgagaatcgacaacccaattttgttatttgagtttcttttaagagcatttgcatcattgaaaacatttttaattaaggttgtgagttctactggtaaattaaaggcaatgtagccatgttcccgggaaaaatcagattgatgcaagagatatttttgccaaggaggggcactatgctccttagaatactgatatatgtatatgctcatttaatgtttagcaataggtctgccagtgtattcagactcagatttaccatcagtagagtgttcatgcttttctgaaataatgtgttatgttgacttttttgtgggcaaacaggtttatagacatactctgataaaagatactaagctatttgaactgtttaacaatgccatttatcttcgtttgaaaaacaagcatatataataccatcacagaaattttgtttagggtacatcaaagtattttgagtaccttactgatgaagtttattggatatagtaagcagttaaataaatggtcagtgccttcctacagcaagtacaagactgtgtatttaatcttccatttgtttccctgtcaccatagcagagtagtaactaggacctgtctaaacactgtaaaaatttgaacacattgcccaaaatttttacaaaaggaatgcaaggatgaaggtgctgatgactaggtggaacatctcatgctattttattattttgtttattgcctgagtagtgtcacattgagttttccttttgaaggttctgtatttcacgtcacatgcacaaataaaaacatgcaacattcttttcattcccacatttttaaaacctaaaaccacttaagccataaatttacaggtagagcaaagtatgagaaaggtttaaagttgaatagattgaaaataaggatgaataattttaaaatactgatttgttctagcaaaataatactgatgttgaaattaccttgaaaagttcatgctttcaaataaaaacacactttcttttctagaaaataatcttttcatcaggtgatacttcaattatctattggaataaagtctatatgagttatttaatttatgattatgattgatttatactgctgaatgcagtcaatttttttcatttactgatataattgggggaaaatcctttaatctgcatttctaagaatattattacacactattcaaaattgttcatttttgaaaatggctacaatgaccatccatgtgcataacattaaatttaattatgtaattttattttataaagatagtttatgactatttcaaagcattttcaatatagatgggtatgtgtgtatatatatatttgtatatactgttaagtatatataaagtatatgtatgtgttgtgtgtatatattttaatcctatgtatacatacatatacatatatacatataggattaaagtatataaaatgtatactttatatgtacttaaaagacacacaatgaaaataccctttaaattctgttccttaaagatacctttttaaccattgttgtatatcctccaggctctcaacatatgattttgtgagtatgcaagagaccgtgtatgtaagcatggacatgtgagattgtttccacatgttttcaaacactagatattatcaaccttttaaaactctgccagtatgctagttagaaatatttcatgttgatttacatttaaaaaattgttcttaacactgaacactttttcatataccttttggcccttctgtatattaggtagatgtctgtcacatctcttgtccatttttaaatttcttcttttctttgtaatttgtaagagatactagtacattggaagattcctttcttattctccctacaaagaaatgtcccatctgtcagtttgtagagttgatggagaattcagaaagctcatagtgatgtgaaagtcaataaagccacctggaaacacgaattctctatggctgcatccagctcaggaaacctcccaaggctatgtaaatagaggactcaggtgcctgtcactttccagccaagcaaatttaaatactgacagacacattttaacagattcagttacttcacagtttggtaaactataatcgcaatttgctccttataacctcttagtaaattattcatctccagtgggggaagactgatgtaatgatctcactttcctaccttaggtgtttcatcagtacagacgcctcaccttcccacgcacgcagactcgcagacgccctctgctggaactgacacgcagacattcagcggctccgccgccaatgcaaaactcaaccctaccccaggcagcaatgctatctcaggtttgcgggtcctttagacttgtgcaaatatgaaaagtacatgacgactacctgtatttaagaatggtgtgaggaaatctaaccacttattcaatgtgcagctattgctagttgatgaatttggaatttcagtcactcttaggaatatgaaaccacagaacaaatgtccttttaacagagatgaaataatagtgagaattgtgagactacagcaaaaatctgctcaggaggaaagagttattcagaatagtctattttttatatatttcaggcaattaccattctacagggaaaactttttgttagaagtaagaaataatatgcataaatctttacttaaagactttgtaccaacaaacaaaagggtgaagagtgattcctattatcagtgaagggcagtgagaaattgtaaccacaatgaaactgttatttaaagaatgagaaaaaaagaaaggaatgggtttatttcccattcaaacattaagaatctttcaggatggcatctctgtgtttataacaacaatgcagaatatttcctcccttttcttttcaaaattagtgtccaaatcacttcttggtgtccttttatatgcaagaaaaacaagtatgtcttttgtcagatcacaaatccacacagtctcgtatataatttcagtgatctgagtgcttgaaagttaaagatataaatggtagacctatgtagctggtaggaacatggtcttgctttaggtaggaatcaaacacatcaaatagaataattattattttgcagtattaaaactgtgcccttggcataaaaatcattccaggcaatccacactctttaaacaagtgggagaagagccgccctcaccttcctcattccatctagtccagctgccatgggaaccacaataaaaatatttggagcttttagcaaacccacagatccagaaatagtggaggggcagaaactgtaaaacaacaaaaggggactgacccctggggctggttgtcacacagactagtctgctctgtcctgatcaaggaattcttcttctcaaagaagtggctaattccactgatgaaaaatctattaggattaatcaacctaattaaaattgtaaatgccgtccataaccaccactgagagtacctacataacaagggaaacgaagttttcaagtgaggaggagggaaggtaggaagtttcgggaggttgagagtggaagcctcaaaacagcttgggagcagggtctgctagagaggggagaacagatcaagtgagtgagaggagtgtggaaaagaaggtggaaaaaagctgatttcaaaactctgcagagggccagttctatgtctgaatgagttttttaaaggatgaataaatgagctttcctcactcttctacatattctgctggagccctcctctggggatccagagtggaaaacctcatgtttatgttgtttattctattctatggtttagttaaatttcgtggtttagtggcttttgaagactgagctgagaacccatgctcaattatttggaagatgcattttcaattctaatggaatgtatgtgtgaaattatagactgtactgcatttgtaattggtagacacctgcaagctcaaatcaaagccatgttcagaacgtgcatgcatgtatcactgcagaaatacagactctgcctgcaaatgtgagactaatctcacatcattgaactgatgaccccagggatcttgacagaaaataacccaacaagctcttgaatagagggcagctcatatttcttttgctttttccatggcaactagcatagtgctagtcatctagtaggaaccaaatgaatatacattgattgcctgtgctgtaattctggatgtgatgttgggcaaaggtgtaaaatacattaggtaatttgaagcctgaaaatggaaagttctaacctagtacaatgtgcagtttctttggctacaacactagattctataccaattagcaactatgtgattgaaaaataagagaatgatgccactgtaatgtggagtttgttggatttcaagccaatttgatttttcctggccagggaagcctgaattgtgaaagtagaattgtaaccttcagctggaaaggaagaaaaagaaaacctttgagctcatgctgtggcccaggcaggatcccattcagctctattttaagaaaattaaaactgagcacctgcacccagggatccctccccagagaggtgtgtgcctgcaaggctctcagcatgtatcaagttgcacttcctcctgtgccaaccttttacactcagagctctacctccatctacatggtctcagcaccactaagacagcaccagtctctactgctttgatgcattttttatattgcctaaggcagcctgcagcccagagtcttaggcttcttgggctgtccaaactatatatttttttaagttgtgctctgattatgaagctgcataggtttccagttgtctgcccctaaatgcatctttcccataagccctggtatttttggtacagttctgtagaatgcatgtgtcgtggtatagcagaagtgcttgaagatttgtttctctgccttatctttagtaattgtgtttatgttggctatctggctattgcccttgcgtgacagacacaagtgacagtgctgatggcccttctgattgcagatgtcccaggagagaggagtacagccagcacctttcctacagacccagtttccccattgacaaccaccctcagccttgcacaccacagctctgctgccttacctgcacgcacctccaacaccaccatcacagcgaacacctcaggtctgactatgctgctctagtagtgtcttcagttatagataatgaaatggaaactcaaaactttaatgtagctcttttattttgtgccagatattatttgtaggtttcccattttacaaatgttcacgtatcaacaccaaattatgcaaaagaaacttgccagtaagctttttctgggcatattttattttactattaatattataaaagtccatggcaaagaagaatcaataataggccttaatgtcatatagctctgggatcaaatccaatttcttcaacttcgtagctgattacagggcaaattactaatactttctgcatatcagatttgctttctgtaaaaatggacataataacactccttttttaattatgtcaaaataattaacgtgatgtctgaatatgtaaaaatctggtatgtaataaatattttaaaagagtaattgtgacgcttattagaatccaagtatggaaagccgtgaatgaaagggaaatgaatagtctgaggaagattgcatatcatcaactaagaattatatcaaggaatgaatagttttccctcaatttatacaatgtttagtttaaataacttgaaataaatctttgattcactttattattttaaaaacaagcgaatgtcaaatcaaacgaggactcctagagcaaagatgccaataggaaattatctttgctaaagagtttttctttcaccttttaatataacgaattaattagcttttattcttctattcattttcttgcagatgcctaccttaatgcctctgaaacaaccactctgagcccttctggaagcgctgtcatttcaaccacaacaataggtgatattaccctcagtcaggcagccacaccatccccatgtgcctggtgatgtgctctcacaagggccttccacccactctacctcgggctcctttctttaagttgcattaagtgtttgaatcctgagggtgatggaacagcaggaagatatttctctgcttagcagtgcaacagctgatgagatcaggatgtaattgttactgtcataattcatcagaaagcatgtgtgagaaacaaccacatctactagaactttttctcacaggggtttaggtcttagtaaggaaaagaacaagcccatcaaaggggctgtccattgcaagtggtgagcatcagacggctgatggcagagttcccgttaagcagtgagagggcgtggagataaaggaaagagaaactgaggaatggctgcagcaatggtggtatctgtgaatcagcaagtaagctgatcagagcttgcaagcccacaattctcctcaaattcttccaacccaaaatcaagatgagcagagatctcttagcttacacaaagcacatgttctcccaattattcaacttaaatgcctacactcacacaagatactgctaaatttgttgacagagcaatttgttaccctggatctagtagatgtgcaaagagcttacaaaagttaatctagagaatgaagcagtctttgcattttctctgacttttttttatgtaaatgaaaagtataaacttcgtactatgggggttataattatataaattaacattgagattaatcaaaatatgaagacctttaaaatatttttggctgtgtgaatcttcagccatgttgccataccgccaattagatgcgtacctaaaagtcttaatattgttaattgtatttattgggtatatttatgaaaaattttatagaattagctcattcctttataatgctttaagttttgaaatgaaaacctgtactaggcaaatccttcatattctgttaaatctaactagatagactttatgaagtagaagtattgtaaatcagctttcccaaaaatgacatggcagatattctaaagcaaaattttaataatttacattttttttctccattacagctactactccatctaagccaacatgtggtaagtttatttacttagaatcagcatacctcactttggaatagcactttaattacatctttctttattccaagctttcaggacccactagtaagctaaactcactggctctaatttctcaccgatgactagtctcaaattagtaaaaaattactagctacacatggacatagagttgggaatgatagacactgggaaatacaagagcgatgatggagggaggaagacaagggttgggaaactacctatattgggaactgtgcctacttgctgggcgtcgaattcaattttactgcaaacctcagcatcctgcaatatacctttgtaacaaacttgcacatataaccctggaatccaaaataaaagttgaaaactaagttttccagttagacaactttggtaaagccacttaatttaatttaggtatttgaaaaaaaaatggaataacagcaagtttgttggtgagggggagggggacaaggattcagtgtgatgataaatataaaatgtggataataccttcaaagcttatcaagaagaaaaatctctctttttctctctctttctgtcttgcttgttaggggctggctcaaagcagatacttgaaaacagtttgtctctctttttttttttctcattttcttccttgattctcagttgaagcaaagcggttcttcatggtcagggcttattcctccattcatttctaagtctaaccactggagtcactgccttcagtagctttccatacatttagtgtaaagagtggccttcatatgtctgtttaattaatatgatcttttgtaatccggttgtcattcatctctcctcccgcctcttgaatcattgcctccttatgttcttcacttaagtaatatggaaccactttcagttttcttttctttctttctttcattcgttagttctttctttcttttttttttttttttctcactctgttgcccgggctggagtgcagtggtacaatctcagcttactgcaacctctgcctcctgggttcaagtgattctcctgcctcagcctcccaagtagctgggactataggcacatgccaccgagcccagctgatttttgtatttttagtagagattgggattcaccatgttgcccacgctggtcttgaactcctgacctcaggtgatcaacctgactcggccttccaaaatgctaggattacaggcatgatccaccacgcctggcccacttacagatttgtaaacacatactgttccttcctgcctctgtggccactcctgctcttcctctacaattggaattctgctccaacctcatcccccaaaccccatgtctatttttctatttcctgctcatattttaaaacacaaactaagtcactttctctggaaatcctgtcctatacctccaaatggaacagatctctctctttctagtgccacattatttcctgcataatcttattttagaggtttgtatgtctcctgcaattcatgcttgtgtctgcctccacactggattatacatttctaaaagctgattatatctaacttgcctttgaattcctagtattggtgaccatgtcttacatatgacaagggcttaataatttttgttgaataaaaacaaatgaataaatttatatttgttgtaaagatatttttatcagtcagcagaaattgttgacactaaacaaaggtgctttggaggtatattatcaatcataattttacccaagttaaggaaagaatgagggcttctgatccctgagtaattaatgccccacatatatcaagaaacaggtggttaataactacgttttagaaaacaagaaaattataaagcaagaataaatttctcaaatgcatcatttatttgtgcatcaagtcaacaagtaactagtgagttcccattaatgatacatattatgcatactcctgaatttacagtgataataaaaatagcctagactttgctctcatggaagttccaagtccagctaggaagacagacacttatctggtaatcatccaaatataaatttacaagctgaggtccttgttagggcagtaaagcacagataattacgaaaaaaatgatatggaggcacctaatgtgttttttctttttcatgttttttggggatatttggttagttgatttgatattttggcatttgcattaatgtagttttatttattctggaaaaataacactcaatgttctattttcttttagatgaaaaatatgcaaacatcactgtggattacttatataacaaggaaactaaattatttacagcaaagctaaatgttaatgagaatgtggaatgtggaaacaatacttgcacaaacaatgaggtgcataaccttacagaatgtaaaaatgcgtctgtttccatatctcataattcatgtactgctcctgataagacattaatattagatgtgccaccaggtaaatatcaatttatttcttttaataaatttataaaaacagtacacttttgtgtgtggtgttctccagtggtcacaggagctagtctggtgagagaacagggctgagggaaaggaaattccttggaaacaagtgggtgaactttctgctgtcttaaccaagtaaaaatgatagagtcaaataagccttctgtttacatccattaatcaccacttctacttatttaacagggagatgtttatgtgcactaaatatagtttatcctgctaagtgattgtctgcaagctttctttattctcctctacttaaatgaagtattaattatatatgtacatatatttattcttttaagtacaaatttatctgaaatatattagggagaaacataaaggatttgatgtgtatgggaagaaccaaaatacattcataaaaaggaaggttatggtcatgttagtgagatcaagttggttttgtcagctaagctactgcttggaaagaggagggggtgacaggcgtcgggcagactctggggaagcatctcttagccaaatgcattctggaaaagggattccagagccgtgtaatttttttaaaaagtcatatcatttaataattcaagactattaataaatttgttaacatttaaatatgttaacatcaaatgtattttgaaaataaaatccatttaatttattcattttccctaaatattactgagataaattaccaattaaacacagaagatgacaatacttaaaaatgcatttcccaatagggaaactcccaatacactttataataatcattcaattaaaagtaagtaaagagtaaacaaaaaatttaagataaaaacaaaaatacaaaatggaatgagtgttttttaaaatgtgcgaaagctacaattttatcaatatgtttgcttgcatttcattttttaacgtggtataacttataaatgaaacactaccaaaatatatggtgctaaaaataataaagtaaataataaaagaaacaaatccctagagttattagacttttcccatagcaatctcaatccttgccaaattctatgtcattagcataatttcagtggctttaactgacatgttaggaatgaatgagggcttaggatacacattatgaaatactaatcaagtttatttctgtatcttcttgtcaggggttgaaaagtttcagttacatgattgtacacaagttgaaaaagcagatactactatttgtttaaaatggaaaaatattgaaacctttacttgtgatacacagaatattacctacagatttcagtgtggtaagaatataacattgaccagagaatttttttttgtggcacaatgttgttctagatattatttaatcttactctctgccctttctctcttcctccctgcctctcttgttctccctctgtttgtcttttttctttcttgtctttttcttggtctgtggtatatttagagtcaaataattaaattacctatacaattcaaacaaattcacaaaataaatgaatacttttcatgaaaaataaatatctaaaaattgaaagtcaattaatttacaataattttcttggcaattgttatacacaggcattgttgaagagatcatgaaagaagggtgttataaggaaatgataatacacaaactctgttatgaagtaaggaaaaaaaatacaggattgtatggttcaagagtttactttttccatcctgcatcaacaaaattcatacacaagttcaagaacacttaaataagaagaaagcagaaaaagaacagcaagtgcatctagggatatgtttggatttgaattgaggcaactaataattgagatagtatttttaaagtgtatttgaatttaatgaggtgaactctcccaccctttgacttaaagccatctgccaggccatagctggcatgacagacagatgtgctcaggtgtgcatgcgcatgcacgcatatccacagctacacacatagaggatggagcattgcgctgggtgtaatcatcacctaatcaccatagtatagattcatggccatcaggcaagcagacaaggaaaggaagagcaatcatgacagaccaatgataaaatgttctctctagacaatctattagatgaagactaggtgaggtgcaatttcaactttaagttgtatttgctatatacagattgggcatccctaatctgaaaatccagaatccaaaatgttctcagaatccagtactttttgagtgccaacatgatgcggctcaaacaagtgaaaaattttacacgtgacctaaagtgactggtcatagtcaaaatgcagaaacataacacagaatttagtcagcatccccagagaaaaataaatgacctcaagctatgtatatgaggtatatatgaaacataaatgaattttgcatttgaacttgtgtcctcttcccaatatattgtatcatctaaatgcaaatattccaaaatctgaaaaaaaaaactaaatccaaaacacttctggtgccaggaattttgaataagggaaactcagcctgtattttcataaaagttgaatgtaaaaattatttttagggttttttattattttggtaatttccacagatgtttcaatctgataaatattaaatagagaattataaatgtgaaattagaaaataaatgtgtgcgtgaaatattgcatcgatatattcattcgaaatatttctttatttcaggtaatatgatatttgataataaagaaattaaattagaaaaccttgaacccgaacatgagtataagtgtgactcagaaatactctataataaccacaagtttactaacgcaagtaaaattattaaaacagattttgggagtgagtatgttacttgcatttatatgtaaaattgcttctctcttcatgttcttataattatttgagaatcataggaaatgaattgtctttttgctgtttttgatactttttaagcatatgctttttatttcaatgaagcgcaatttatctatttttacttcttttgcttatgtttttggtgtcgtatatgaaagtccattgccaagtcatgcagatttatccatatgttttgttctaaaaattttatagcattggctcttaaatttagctctgttacccactttgagttaatatttgtatatggtgtgaggtaacagtctaatttcattttgttgcatatggccatctaatttttccagcgccatttgctgaaaatactatttattcccccactgaatagtcttgccattcttatcaaaaattagttgaccataatgatgggtttatttctgaactttcagttttattttattgatttatatgtcatacttacactgtcgattactgctgctttgtagtaaattttgaaactggaaactgtaagttcccccaaattgttacttttcctcaagattgtttagaatatctaagggaacttggaattctgtatgaattttaggatcaacttttcaatttttataaagaagccatctgggattctttcagggattgcattgaatctgtggataaatttgggaaatattgccatcttaaccatgttagtcttccagttcatgaacacaagatatctttccattaatttatgtcttctttaatttattttcaaaatgttttgtagttttcagtgcattagtgttataattcttctgttaaatttatttctagtttaagtttattcctggttataatgctgttgttttcttaatcacattttcaggtttgttactaatgtacaaaagtacaattgatttttctgtattgatcttgcagtctgtcacattactgaatttgtttattaatgataatattgagaaatttttgacaaaacttataaatgtaattctaaattttgttttgttttgattttgagacggagtctcgctctgttgcccaggctggagtgcagtggcgtgatctcggctcactgcaacctctgactcctgggttcaagcaattctcctgcctcggcctcccaagtagctgggactacaggtgcgtgccaccacgccctgctaattttctgtatttttagtagagatcaatctcctgacctcatgatccgcccaccttggcctcccaaagtgctggaattacaggcatgagccaccatgcccggcccgtgattctaagttttatgtaaaaaggatagttgaaggctaaagaggctgcctaaatccttgtctcctcatacttctccaaaataatatatagctacaagaacagcaaataaaactatgtaaaaactatatcctcagcataactagaaaattttaatgtatttttattagtaccacaattattacattctttataatcaatgcaacaaaatagaaatcccagaaaactatgttttatatttgaaaacagcacaaaatgttttcagtgggggaaaaatagtcttttcaactaatgatcctggtatctctgtagaaaaaaaatgaacatcagctctcacctctcaacaaacacaaaaattaattcaaaatggattccagacctaaatactaaagctataatttaaaaaattctaatcaaagacataggagaaaatgtgtagctttagcaaagatttcctagggcacaaaagcaagaaacataaaacttttttgatgaattggagtgcataaaaattgaatattcctgctctttggatgaggccactaaggaaataaaaaagcaataaatagtttgtaaaaaatcaaaattaattttttcaacaacagaagtttttccagaatatacagagagctctttcagctgcaaaataaggactaaaacagctcaattgaaaatggacaaacatttttaatatatacttcacaaaagaggatacacaggtggttaataagcacattaaatgatgctcagcatcattagttaactgagaaatacaaattaaaacaacactgagatgataatactatacatccattaaaatggctaaacttaagaatacggatactactaactattggtcaggatgtgcagccatgacccaggaatttcactccaggtatttaccaaagaggaaacatgacaaagcagatgcattcatagtagccaaaacctggaaacagcccaaatgtgtattcactgttgaatcctaggtaaaatgtggtgtatctttacaataactactgataattttttaaaattctaactatgacacatgcaactaagtgaatgaatcttcagaacattacattgagtgcaatatgttaggagtgaaaaagtacttactgtttgtttcattttatttacatgcaatgggtaaaaagacaaacttaatctgtagttaacagaaagttgatcagaaggtacgtgagtctggtcaaaggagctgagttgactgggaagtaccacagaaggacattttgggatcacagaaattttctttatcttgattgtggtgttggttatgtggatgtatacatttgttaaaaatgcattaaactgtatctcaaatgggtacattttaatgtaaattttacttcagacattttatttaaacatttatcagtttttctcagtttcaaatgactagttactggaagcaatgacaagtgctactcaatgactgctaaatttattggtgctatgaatgccagatttttagcacagcaaaatctacaaattccaggatttttaggtagtatctgggcaagaatatatatgaataatgtatatgaaaggaagagggggttcttagatatcttcaagtcagtggaatgcttaggtttcacagtgccaatctggtgtgacatttactttgttaaaggaatttactctaaaacaaattaaatgagcccagatgcatttctttaaattttattttgaattcatcatttgtcaaaatatggttatcaataatgcatgcttataatatgaagaatgctttatccatgtcttatttttcatattacataacattcttattcttttaacaggtccaggagagcctcagattattttttgtagaagtgaagctgcacatcaaggagtaattacctggaatccccctcaaagatcatttcataattttaccctctgttatataaaagagacaggtaatttgtgtagaatttaatttcatcagaaaagagaaatcaagaatttgaaagtactagaaatttttattgagccagtgagtcacaaagctctctgcttagagactgcataggcatagtatactccctgatcttagaattgcttccactcattcaaagctttccagccccagaaatgactaaaatccagaacattctaaatatttgcttgtccttcttggtcttagtttaaatctttgtgctccaaagcctagagacagaaaacctctggatgacaacactcatttctgtcttgcaagtattatgtaagtgatttgactcactttgaactcatcattcagcctcctaaacaaaccaacaaacaagcaaaccccttgtaaaacttgtttcagctaataatacagacaaaatgttgggtgaataaaaatgaacatgggcccatgtagccgctggggccagtttggtgtaatcttgggagcatagttctaagtttagaattagacttctgcagaagtaatgcaattaaaaaaaaaaagaagaagaaagaaatgtgctatgactagttcactcatgaaatgttcaaatgagatgctatttaagagaacaaatatcttctggacaatttaaagtatctaaattgtttgtagaaagtaacatcagtggagtatctcagagcagcctcaatgcctgggatagccctttctctattcttttatccataggttaaaataggaatgaagtgaacctcatagaattctgtcactctgtgctgtggggaaggaaccagacatacacttcaaaacttgaaaagtgaaaggctatttttcttcattatgttattttatattttaatggccttttcttgctagtgtctttaggtcttaataatcagactactaaagcaaagttaaatatgcatgtagttttcaaattaacattcaaaggccaaggaaaataaatatatactatatatttgaggttatgataaatttaaaagttaagtctatgtggaaggaaaaatggaaattccaggaagataaaacagcagaggtactgtctgcctcattggacacctcttttacaaacactttgtgtagcttctatgggaacacattgttcattttttttttctcttctctgaatcttctattcactatccctttctgcattcctcaatgtctacactctctctactagagagtattgtcgatgtcagagtatatggtagacattttatgcatttatggctcttttatatttttacagtttttttaaactgtatttccactgtatttgcataattagggtaaaaaggatgtaatgagttagtagcaactcattacagcaactagcatgggtccttcttattgggcaactaaatagtgttacccaaatttaacagctgtccacatagaacacttaaacgggattgaatggctgagaaggggaggctagctatcaggctgtgtgttttcttttctccaaagctgccgattggtgactgaatgcagctttggaccatgccctgacactgcataaagggctctttggagccagctctactctaaacagcgtgctccgcttttgttttctccttcatctcaaacatatacctgtctcctctcccatgttacctaaggcaaagagagttgataggattatagtatcgttaaggcaacttaacttttctcaccattttaaataaaattactattaaaaatccacaggaagaaagtctatgaaatttgcagtttactttttaatcagatattaaatttcacttcattacttcacaatttaattttttcagtgtctctaaaagagagggattaaaagaggagaaaaaatgcaattgacattaatttagttttattggtttagcaggtttttttaattatgtattatttaaagattttatcaactattttaataactcagtggagatgtgcatacatatcttcatagttcatatgatgaaactgaggttaacagaaaatgtgatagatgttcaagttcagtagcttgatctgtttcctttctgctcttggttttgtttgtttgtttgtttgagagggagtctccctctgtcgcccaggctggagtgcagtcatgcgatctcggctcactgcaagctccgcctcccaggttcacgccattctcccgcctcagcctccctagtagctgggactacaggcgcccgccaccacgcccggctaatttttttgtatttttagtagagacggggtttcactgtgttagccaggatagtctggatctcctgatctcgtgtgatccgatccgcccgcctcggcctcccaaagtgtgtttgtttatttttcctcacatttttagcttaagatattttggagaactgcagttttatctcgttaacttaatgatggcaagtgacagtgaagcttcttggtaattggggaattggggaagagatcttttgtgctttattggatttaaaggattatttttcaaaagttactgaaagcaataggcacctttcaagaccaccatgatgttgctggaaattattttgtgtaatgccttttatttttttaagaaaaaaaaaacagaacaaattgcttaatctctctgtggctcagttttgtcatctgtaaaatcagatgatagtgagtaccaactaatagttgcagtgatggttaaattaattatttcatgtataccccttgaaacagtgcttggcacatacagtgagttattatttttaaaaatcgttattgatattattattactgttgctgctatccagaaacatgttgccactctaatcatcctctttcctgatgtcacttggctactcaaaaatagcagcagctggtgatttttttacttaacaagtgctaagtcttctgcctgagtgtgaaaacacacttagacactgtcctacctctcatatgcctccccagccagagctgttgtcctgatcaggtttgtcactaaactcaaaaacattccttcttccgtttgtaatattttcttttctcccttacatgtattcagttccacttacctttcaatgaacagctgaattccacttccggcatgaaactccctcattctcacagctcccgttaattactgtagtgtccaaattactatgatagaatcaacccaatgactgatgatcaaatggattctgcatctaacattcaaaacagtagctaataccgatgttcaaagtttggaggttacatatcagaaaaggttttctaaaaaagaatcattctgaaacatgcaactcaagacttacagtatacactgggggctgtgttttctcagaaacaaaagagatcgtcttcacaaatgaatctgaacttattaaatattttatgtaccaaattaatgatataaaaccataatttttcaatatttaattttaccaatgataattgagtttgttcaatacactggctgataattgtaggtacttttgagtatcaaggatgtacttatttttcaatcactcaatagtttggagttcacttggaacaatgtgatgtagagaccaaattaattaggtacgtggtagtactgacttttaacgacttactaattttttttcacatttttcctcagaaaaagattgcctcaatctggataaaaacctgatcaaatatgatttgcaaaatttaaaaccttatacgaaatatgttttatcattacatgcctacatcattgcaaaagtgcaacgtaatggaagtgctgcaatgtgtcatttcacaactaaaagtgctcgtaagttatatgttttaatgcttctttccataaatggtaaaaagcaaggtatgaactttttagcctacaatatttctatctttattctagcaagcacatttacctggcacatttgttaacatctagggcttataaacacgtaaaatctaaaagtttaaaaaccgttatcctggattctctctcttcttcagatatagtcatagaattttaaggacaaagcataaaagcatcttaattggcatcagtttgtgcaatttcatgcagttaagtacttaaccaacttagattaaaacattcactgtttgctgttgtctttactatctggaaatattaattgtaatcagaaacctaacaatgtctcataaagcattagcctactaacctctgttcatctgataaaacatttcataaaatgtaatattttattagcattttcttctcttcgttaccctcaactacttactattctattttatgtcacattatccatttaaggtttcctttcaatggcatttggctcttgccactagtataatctctccatagtttccaggcccaaagttagatctgcttctggggcacatgttaacctccatcgaggacagggaagaagaaatgccgtgttttaaggcagcatctatagctccagagaccctaacgggcactagacttgtgaagaaatattgtgctatttggggctgaatataagacacttttaaggtcatttaggttttggtttgaaaagttctggtcctggagctctatgcttttgttgttttcctgagtttctgtatcacagaaaaagaagacaatttgtttctgttcctgaagaacccatctaggtgtttaccaggataacattagcactccgggaaagaagggtctagattgtgtaataggacttggaggtttcccaatcaacaacatttttcctctcctctccccaaacttccccctcttccccactcccttccctttttctctattctctaattctacacagtctccttcagggattgcaataactctcatggcttcatgtacaacctatatgctaatacttactgaataaatgagtgatttattcttcagggttttgatattgttttttaatttatgtactatcataacttccttatttataacccccaagctaacacttaaaatactttatactatatccaagtattgtcaagtaatttacatatgcatctattaaattattaataacaaatctttcttcattttgatagctccaagccaggtctggaacatgactgtctccatgacatcagataatagtatgcatgtcaagtgtaggcctcccagggaccgtaatggcccccatgaacgttaccatttggaagttgaagctggaaatactctggttagaaatgagtcgcataagaattgcgatttccgtgtaaaagatcttcaatattcaacagactacacttttaaggtaaaagtatgctctctacattactatagtaccaactacattataatgattgattcatagtacttaaataactttaagaccactgctcacatgagattgagaagctctgatgtgtaatggaatcacacttaaagagtctcaaatatttgactctaaaatttttattcctatagctcaagtcagtggtttaaagcaaatgtttcattggaatattttagaacttcaatatgacttaattatagctaaattattgcttctgtgttaagaagcacaacactttatgcacaacagattattactttaccaaatctaccttttctttactttggctttttatctttattaatgtggaatttttcaattgcaaaatttcacaggtaccttgaggttaggaaatatttgaaataaacactagacaatactagtgagcatacagaatttaaaacactcattatctcactgtctactgatcgtattttgtacatgtaacttcataatatacacatttatatgcacttaacacgtattatcaacattctgagtacacagttttcaaaatacagttttaaaactgtatttttaatatatcactatatcacacacacctttctatgttaaatatttaactactatgtagtttttaatgcctgtataatattctatgtatggctttatcacattctattaactataactatgttggtctctaatataaacaacattccgataacacacttattggtaaagcaaaatttttgaatgtctttaataatttatgtttcataaattcctaaaaatgcatttattgggtcaaaatgtattttgaggctttttggatatgtaactttttttttctataaaatttaccaaattgccctggtgtatcagtgtatgaaatgactgcttcttgagaggctcaccaacactgaatacgcctttctttttctttatttggtggttgaaatatggtattgatatctttcttttaatgaagtttctttacttattgttctttgtgttattctttgcctcttttatccagttttctccggagaaatgccttgaatattaatgatattaaactctttgtcacatgcgtaaaaatgttatcagtttataatttgccttttagttttcttcacagcactttgtcttacataattcccctttttatttttaaacaaatgtatctgtcacttttattcctgttaaatagaaatttccatagttaattttttaatatgatgttgacaaacggcctcatattctttttttgttttgttttgttttgttttgtttgtttgttttgttgttgttttttgttttgagagggagtcctgctctgtcacccaggctggagtgtggtggcgtgatctcggctcactgcaacctccgcctcccgggttcaaatgattctcctgcctcagcctcctgagtagctgggattacaggcacctgccaccacacctggcaaatttttgtattttcagtagagataggttttcaccatgttggccaggctggtctggaactcctgacctcaagtaatccgcctgcctcagcctcccaaattgttgggattacaggtgtgagccaccgtgcccggcccatattctttatcacttaaagaagtgttttcatatttataaactttttgattttgtttttgaactggaaatgtcggttggattttatcgatttttagggcattatgatagatgatgccatagttgtgatgccctggtgtgattagtttaaatgatgcaaaaccattgtcacattctaagagaaaaacccctgctctgtcattgtgtgttattctctcagagtattattgaaatcaacagcctattattgtctttattagtagatattcaaaaaggagatcattcagtgagtagagacggtgttggcataggcgttggatgacatcattcttattaaatttggtataaaggttacactgatctgataaaacacattgcttatatgttcctgtttttctgtatcatataactttttaaaaaaattttattattattttttgagaaagagtctcgctttgtcacccaggctggagtgaagtggcgtgatctcggctcctgcaacctccgcctcccaggttcaagcgattctcctgcctcagcctcccaagaagctgggattacaggcatgcaccaccatgcctggctaatttttgtatttttagtagagacgggggttcaccatgttggccaggctggcctagaactcctgatctcaagtgatctgcccaccttacctcccaaagtgctgggattacaggcgtgagctactgtgccaggcctatattatataactttaaatagtataggagtgatttgttcctgaaaaatttgtcttcattcctttcatgcagagaaattctttaagactcatttatatcttctttcaataggattagtcttttcagatattttactctttttgagtgagtgtgctatatatattttttcaaagaatagtcaacctaaaagaaatattttcttattgtcacatcattgtgtattatacttcattccccactgcttctccagtgcccattaagctccaggtgcactggtttctctataatttctcagaggcacctaggtgttactctttttagccacctccctccacgctcttcccacttcctagaatatgcctctcccactcttcaaatcgtataagttactatggaaaaatataggtgtacatcatattaaaatacaaccttaacgttcaaagtaggagataattattcagtttcgaattctcttcccccaatcttcaaaagatggtttttgttttctttattatacttgccataccttcttattatgcttatttctgtctccactatcatgttttgtgttcactccttcatgagagagcagtcatttcagctttttcaccattgtgatctctggttaataaattaatgaagttgatttattagtattacttttccatagatttattttgatgctcttcaggtggctttcggattaaaagtgttttcttccttgtaattttttttcatttttataaactaaagggaaaaaaaaggctatggattgtactttggtaaaattttgactgtaacccatgtctatatcgtttgtcactaatttctgaaggccttcacatgaaatgtaatcaatgattcttaaagtaaaacattttgattattgatgatttctaatgagtctgtagttataatttggaagagtttttaatatatccattatttaagagagtttttctacatttctggtgctttaatttcttattgctactaattattagctgataaaagttaattggcttttacaatttctgccttttaggatttgtagaataatttttacagctctatgtgtgatatttatgaatattctgtgaatattgggtaaattatatattctccataggataaaagcttagatatatatttgtcagatttattatatttattattattctcttttaatgatattattcaaatatattttacttaaatttttttggtcaaggattcttactgctcttttgctcttttcattttccctgtatatgtaaattgttttcacttcatttgtattacattttatgagacacaggtgtttatgcattatgcctatatagtaaattttactatatatccatttgcccttaaaaaaatgtatgtgcattttatgcataattctagtaaacagcttatggttgaatttccttttttaattaaatattagcctattaatagggaattttaactttatgaatattttgatgtattggattttatttcttcatccagtttcattattttaaataattatttaataattgtttaataactataaatatttttattgctaagtgagataagatatctttttgattgtcttttcaaatatatttgacaacatactgacataaccttgaagtttaaagcaaatcagcatacttttattgtatgcatggtatgaaagataatataaatgttttacattgtgatatataatatatatatatatataaattcacattagcaaactaattattttattttttgttactgaaattcaggcctattttcacaatggagactatcctggagaaccctttattttacatcattcaacatcttgtaagttatcactgggctatttattatatatattaagatatatattaatgcttataaagctatattattttacacttataatcacatttgattgttaaatgcttaaataatatctcttccgtaaatgtaatatttttaattgtcagtaaaaccatacatatatatgtaaatatatttaaatacaatatcttaaattcaagttaggagattcaattattaaaggtttgttgaattcataagaggatttatatacccaaactattaaattatgtttatgtttatgaaatatcgtcatgttagtaacatttttcgtgtactattttagattatctattttattctgtctcttcagcatatgtttagcagaagtgggccttagatacaagtctgtcttgatttacttaatggaagctaatataagcactccctaataacaatatacttatgtaaatatttatcactgatatttaaaatattttcatcaaagtaaaggtgtacatgaaaaattacttagaattaaatttcattataataatgaaaataacagctgcatgttacattccccacccacaattctgtttgccaggcaaccacttttaaccatttctatttttgggtctccttatagtttccttcatatatatatatatatatataaacaatattgtatactgctctttctagagttactaacattaccaattgatctgagcctatggaggaaggagacctagtactctactttgggctttctctactggttaacattgtaaatagaattatttaagcctgtatgtactttgttgtcagcaacttctaggtctttctatctttgccacttctagttcttcctctcttacatatgttacatatgcacatatgcatgtgcacaatcactggtatgaatgcaaagtcaaaagagaaaatataaaaacagcttattttccaaactgctttactaagccctctgcaaagttttagttctttctgctcagatttatgaaataaaaactccctgtgttaaatgtcaaaaaagtccagcaagatagctttgattttatttccacattacctttttcttttataatatctttataataaaaatgacttcattgactctttcctattaaattgtaaataatttatagcagtcatagactcagctgaacattcacactcacatcttaataggccagatctgaaacatttcacctggaaagacacagaacaaaaagcacagcatgctagcaagggagcctggcagtgggaatccttgcagcgggaatccttgcagcagtgcacacagcaatccagctacttttcttatgacactctcaaagacaactgagatatgagagaatgagaccacatgtgtaggtgtaggagctgcattccaaaaggaatcagtatctcttatactatttccatgggcatagcttccagacatgccaacaggggtgtgctcagttatgagcgggcactgcactcagggaaacccaaagctggtacttcccatgaggacaatagagttcacatatagcactccctgttcaggtgtagtttagcaatcaagggtcattttgccattagcaatgttgtctggtaaccagctaatattccacttttatcaggtttccaggtcaacggagccaaaaaattagccctcatctttttccacaaaggagacaacattgtattcactctctgctcacaatatcattatcctaagagataaataatatagtttcttttaaaatagtgatatctgttccaggaaaggacttgggctgtgaattgctagggtacagctactagggatgtgttgttgggtttccccggcataatattccaccacctgtactttgacatcattgtcaattgaactcctggggaccctttcttcttgctctgatctggactctcacatgccatcttgaaatattcccccatcagttttctggtttagatttgctgtatcacacatagttatttttttttctgtctgagttcactgatatatgttctctagtgtaagaaaaataattctaattctcccatacaaaaaaaatttttattctgctctggcacttgttcagtgtatcgacttggtataaaattctaagttaaaaattttagaatttaaaaattatttctgtcttattttcctgaatccaattttactttctaattccatcctgattctctctctctctctctctctctctctttttttggtctgttcccaagttttcctcccctggaaatgctaggtttctgtctttattcttggtcttacctgaattttttgtttgttttgttttgtttgtttttgtttttgtttttagagggagtttcgctcttgttgcccaggctggagtgcagtggcataatctcggctcactgcaacttctgcctcctgggttcaagtgattctcctgcttcagcttcctgagtagctgggattacaggcaggcaccaccacacctggctaatttttgtatttttagtagagaagggatttcaccatgttggttaggctagtcttgaactcttgatctcaaatgatccacctgccttggcctcccaaagtgctgggattacaggtgtgatccactgtgcctggccctgaatctttttcattcattttttctggatgctattgacctttgtaacctgaagatttatatatctgagaattctttgctccattttcttcccatagtctttggttgagtctattagtcataaaactcataagttgacttattattttggcattcccctttggtgttgatgttttccttaaaagcttggttcttattggtagtctagtcatagtcacagtgagacaacaggaaaggttgattagatgttctgtggtccttagaagatcttggtgactgaggagatttcctatgatattgctgatttatttttttctgatatcattcattatcaccaaaaactaattaatccccagaaattaatctccagaattaccctactccttgttgtgtggtaaagtgtgaaaaagtggttcttctcacagtaggacaggaagataggtgtccaactattgcatatgtggacaattacattgtcctcctaattttagtcctgtgcctcatcccttccctgtactgagcctgactttattctcagtctctcactgctttcatttaattttccttttgtcttctcctccctggtagtattttttcaagaagatattttttgttattgttgttgttgttgttattgtttttgtaaatagacatttgacttccatgttctgacccatgattcacatttactgcatatgtcactttcaaacctgagactcaggcattctgagtaaatggaatctattcctttgatttaggctgtggcctcctttcttttgttttctaccttctacaacttgttgaaattgctctacttctaatttcccttctctcattttcactgtcattataaatctatggcattttcagttttttaatattagcagggttcctggaaagaagggggaaacacatgtgtgcttagaatgcaagctttatctgaagacttggctattttattaagtttgttgagaaaagtctgatgctgcttaatatttttgtagaacttaatctaattattatggattggaatgctaacttacagtcatttgcagtttcttgcaaaatcttacttcagagtattctagaagttagatgttgcctctgatgaggtttttattcacaaaatctggaaacaatcatgctgattgatatatgtatactagtaatcactggtatggattgacaatttcagtgaaaggaatttcagatagagataagacaaggaacactttgggtcattttaggagcctattgcaataagaacttcttccctaaaaatgttcactgcaatccacctatatattcacattcatgtatcccatccatttttatatatgccggcagtataaatacccctttaaaggagataaaattatttctattttatatatgaggaaactcaagtttggataatttaatctatttgccctatgagtcaaagaaatgacagagcctgaattcaagctcaggtcttacagtctgtatctgaaattactttcaatattcctgtttgtatgagtttccagttacagaaattttgatcatgagatgaactgtttctggcagctgtttgcttgatagagtcatttccttctttccagttgtagaaaaactgtctcatgctcaaggcctccacttgccatacagaaaatacatcccctctacttccttatcaccctacttatttttttcagagtatatgaaaaaatgcataattatttcatttgttcacttacctttcttttttcttttcttttctttcctttttttttttttcttgacagagtcttgctctgtcgtccaggttggagtacagtggtgcaatcttggctcactgcaacctctgcctcctcggttcaagtgattctcatcccttagcctcccaagtagttggcattacagacacacaccatgcctggctaattttttgtatatttagtagagatgaggtttcaccatgttggccaggctgctctcaaactcctggcctcaagtgatccacacgcctcggcctcccaaagtgctggggttacaggggtaagccactgcgcctgtctgttcagttacctttctagtgtctgtttcccccaaagagaatgcaaatttcctgaaaactaatattatctctgccttatattctatagcatttccacggactgtcttcctttttatcttcacagcccttatatcttctcacctacatgaccatttacttatttcttctgttcattattaattatctatttttcttcactagagagtaagttccatgaggacaggacccttgtttttctttatgtagatatcctaagtacctagagctgagtttggcagatgaccaaaagccaaaaatattttttttgtgaatagtgaataattagtacttactacttcccagccaccgtgctacgtgtttactgtgaatcaacacctttagccacattttaggattttgggaaaggagggacaaagataataaggaatctggccaagttcccaactaagaagtggtagagctaggattggaagctaagcagtcgggctctggagctgaggctcttaagtcaccgcattattttgctgcattttcactacataagaaaaggtgaatatactggagatatttccaacacaccctctcttctatgccctttccctaggaaagggcaggatttcacattaaacttagtgaatatttaagtcagggtaagtcttatcctaactatagaatgaaaccatttttgtctcttagtgaatggattttacacctcagtgaacaggtaagagggtttatctttgtgaagtagaagtctttctcatccccttaagaggctacccacttctgcatataaagttaaactatatgagtttgtctccaaaatttataataactggattacctccttgatcccttcaaaatgaagtgtctgataaaaaaagagaattaaatttaaatgtgtcttatgaaagaacattatttaatcaaaagaaagataattattcttctattcttactctccttaaatataaaatgttttcattggttcagaacaatatagccaaaatcacagaattagaaatttattgtatttgaccttattctaaaatgtttattttttaaaacctcacaataaatttaaaaatattaaaatataaatactttggaggtgattattcaaccagtctagcaagttatttgacaatcgttctctgaatgtattatttttcatttctagataattctaaggcactgatagcatttctggcatttctgattattgtgacatcaatagccctgcttgttgttctctacaaaatctatgatctacataagaaaagatcctggtaagagttgattttaaatttttaaataataatggtattagtaatggtgcaaacgcatatccatatggcagtgatggaaccagttaaatgaaatatgtgaactagagagaagacagcatacagcccacttcatgacacaacttttaatcaaaaacttttagtatggttttattggtttgaattaaacattaatattattttctaaatttactaataatgttgtggacttgtttaataataaccagtgaaaagaatgtgtgtggtttttagtacaaagtgggtcagagggatctaggagtgtcaaaagaaaaagaaaggagggagatgtctggggaagttaatgtgtttctttggtcagaaacaaccacatcttatgaaaaacagaagatttaaaataaaatcatttagctacttatgtgagtttagcagacaattcttggttgttttctttcctccctcaccctcctctctcctctctgactctgctttctcccatccttctgtcctccctctgctcaaggctcttcctcccttccctcctttcctcttctcctctcctctcttccccttttcttatccctgacttccttcctttgttccttcaatatattcattaaatataagtaaaataccaattgaattttgtgcttcttgagaatatagaaacttatttttcctattttcacagcaatttagatgaacagcaggagcttgttgaaaggggtaagtatgtatatttttgctgatgactattccttcccctgcatttgaatccattcattttatttatttatttatttatatttattttaagacagagtctcattctgtctcccaggctgaagtgtggtggtgcaatctctgcttattgcagcctccgcctccctgttgaagcaattctcatgtgcctcagcttcccaagtatctgggattacagacacacatcaccaggcccagctaatttttgtatttttagtagagatgggatatcaccatgctgcccaagctggtcttgaactgctggtctcaagtaatccacccaccttggcctcccaaagtgctgggattataggcatgaaccattgcgcccgtccccattcattttaaataagaattgggcatttttagtttaacttggacttttgttgatacagtgataaaacttaaattcctttactcactcagcacctgtgaagttcccagtgtacgccaagcattgtgccaggtactgagagtactacagtgacaggcacagactctgcccttaaagggtttagaatctaatagaggaaagcagatatctcaacaaatatgacggtaatttgatacatgccctagtagttgaatgtgtatagttctatagatatatggaagatagaaaactgtgtgcaagggcagaaatctggtctgttaagattgtggggaaccaatggacaaatgagggagtggtggagggacgagtggatggaagtcacagagatggggagatgggatgtctcctcaagtccctgccagggtggaatggtggctgctcccactaaagacacatttatggattggacaaagaacagcaatttgacttgggagaagaaaacacatttgtttatcttttttttcaacatttatattctttaattttttaaaaatgtgatttctgatccagtaaaaggggacaaagtttcagaaattgaacctttgtttacaataaagaaatgtacttgctttctcatgcttaagacaggaataatttcagaactcctttgtctgtgttaatctgtgttggaagtgtttccctctggtaatagcaggtaccaggtctctatgcagaaactttagggctgaatctttggagctccttaaaaggctttatttttctttgcagaatgtaacactatctgatcccttattacatatttattcatttggtcattgactatcctctcctaactagaatgtaagctttgtgaaagcgtggaggcttttttcttattcactgctttatgcccagtaccaaagtgagtacctaggatttgataaatattagtgaataaataacactgacatagggtatcgtgaggattcattttgataggctgagggaggaatgaagagtacaatcagtaataaacacctgagcagaacaggaaaatccatctcaaggagttaaggtggacttggaaagtgtcaatgaaatattttatctcaaaattggtaccgattgcaccttggaacgcagtagaatttactcactcagaccccatgaaaccctgaatgtggccctcagttcagaatgaatgaataccaggcattcccaacaacctaaagaaacaattgcacatagccagtttgagagctgtgattgtatagaaagtttccatgggcaataagataaatgggtcaccctcatggataacttctttctttatctgataaactggtaaaattaatatgattactgaaagaaacactatcagtagtacatggaagagtaggagaaacataattttacatatgcgacagcttaaattctcttacctttctaaagctgttggttttcaagttccatatgcaattgtagctttttatggttagtatactttttaatcttcagtaagttatttcacaaacatggtatataatgtgtttcatatacttgaagcataacaaattaatacaacttgtttcaccatttagtgtaaacagatgatcaaattaagctgagtcatgggtataagggtattaatcatattgtcttatttcatttgcatgtttacagtatttcacaagttgaaaatgaaaatacaaagaaaaataatattgtattataaataaataattatagtaattgctataaaatgcatatagtcaaacgtgaatgtccttataatggtgatgtttggtctgggatcccttctcttaagcatagaaaatggggaagaacattctagtagagagaacaatataaagcccagaagagatctgaagtacaagattgaaaagtcattgatttataggtaaatgtttgtatgtgagtgagatttctcagatgaaatgtgtacgaggaggaaagaagctaaaggattgagtacacggtgtaaatttaatgaaatgtgtatgcccacctgaaagacacatgtaactagtattgaatctttaatatgtttccagatgatgaaaaacaactgatgaatgtggagccaatccatgcagatattttgttggaaacttataagaggaagattgctgatgaaggaagactttttctggctgaatttcaggtgtgtgttgcttttgttatatgatgataaattcgacatcaagacagttccactttaagtgtatttatattgccatttgcctttataatttatcccacttgatattgcaacataagcaaagtagatattattagcagatctctatgaaccagaagagagactcatagaggttgacgggattatagtgtagagctagtaaatattttaatgtagtgctttattgtattatgaagttgtgtcacaaaatgtatttggctgattttgtagttgtactctagatactcatccaagtatctgtttttaaatgaatttgatagtgacacaacaactaatcctaaatttgtccccactcaagagatttgttctgaaagttgtcaatcattaatttgtaagaaaaaagttttttttttaacataattcctgatcttaattttgattactctaagcaaatttttttatcaatatgaagaaaatattttacaggatatctcatttactcaaaacggtcattggtaagggggaaattatttttcctgaatctgctgtgatccaagaaatcgttgtttctttcagagcatcccgcgggtgttcagcaagtttcctataaaggaagctcgaaagccctttaaccagaataaaaaccgttatgttgacattcttccttgtgagtatttattgagtgctgaattcccatatattaggctacttgattattcactatttcacttgtttatttttcttttccttaaacagatgattataaccgtgttgaactctctgagataaacggagatgcagggtcaaactacataaatgccagctatattgatgtgagtaaaaatttgcatttttcttatacctacatatttcattcagctccttgtttgtcttggtaaaattttagaaatattattaaaaatattttgaagtgagcccatatgtcactgatataaacaaaaaattatcaatattagcaaggatagttatttattatgtgactattggtattaggtataacatagaattttcctctacaaacaaaattatattaagaattaatttaatatactctggtgtctattatgtgctagatattagactaaatattctatgcatatatttctcacaagaagtccacatttgcctcagccatgtgccgtataggtgaggactgggaggctcagtttagttaattaccttgttgttgttcacacaattggtaaatatttgagttgaaattcaaccagagtctgactgactccaaaatgttatgctttaatttcatcacactaaatttcagcagacattcctcatcaacatgatcatctatccattggatttatgcagaaatgtaaatgtccgtacgtggttaatttatttaaaatattttaaaatttaatttattatacaaatgttaattaatgtattacataggttaaataattttaaacagtataaaaatatatacagactgaaaaaattctttttgtctccccaaatctgccattttcccagtgtcctcacctaccagaaataactatattttctattcaaatatatatggtaattatggtatcaggttacttatgtttccccaatggaacttagagctccctgaaagcatgtgtcttctgcttttagataggtgattgacatattgtagctattcaataaatacttattaaataaatgaatgtatgcgcaataatgtgtcatgagatagaagtttcaggaagttacttaaattaatgttgaattcttgtgacccatgtttcaaatttaatccaatggcaaaggtcatccctctctgaagagctcctttagttactgaggtgaatttaggagtctgagataattctggaagaagccagtataatattttatctgcctctgtactcctttatcttggtaacaggagcagagaaagcagacatagtaggtaatgaaatgaaagttattatatctcttatctgaaatggcaaagaagtctagggaatcatattccagcagaagttaagaggtgaaaatgcgggtaaaatctaagaatgatttgtttaaagaaattgagtaaaaatcccaaaagtaactacatggctggtgagcttgtttaaatagtggtagatgatcctataagagttggcaggatataaaatgttgaaatgtctagagcactcttgtaaattaccacagcatcgcagatgaagatgaaacctagtattaaaattgtttgaagtttacagcaaagatacatgaaagtcatgaatattctttgcaaatgctaacatgtttagcacaattaaatgcctgaccaccaattaataagattcccttaatactttgaaactgcccagagaaattcacaatcacaaaatgatggatctgaagcaattcctctaactcacaatttttcctgttaatgagtaattgaatgttcagcaaatgacatatctctgcatgtgttttcaatagggtttcaaagaacccaggaaatacattgctgcacaaggtaatttctttgataatccaatattctttttgaaaaatttttatagcacttttaagaaaatttttcttatcagcttttatttgtttacctcctaggtcccagggatgaaactgttgatgatttctggaggatgatttgggaacagaaagccacagttattgtcatggtcactcgatgtgaagaaggaaacagggtaagaaccaagaagattcatagtgtgggtcttggggttaggaaaacaaggtgttgaatggcattttgaaaagccacatgtatctgcctgatgactaaaacagagagttctctattttaatcagtgttaacatttaatttaaaattttcatacatgtagaaaactaaaacttttaacatacaaatatatgtctatatgcataaaatttcaatgcttctgattaattgctagactcttaacttgattcctgtttctttgcagtattgttataagttcagtatatttcactgttttaacttcacaagaccttaatactcgaaacaaaactgaccttgggcagataggtggtgagtcatgtaatgtgactttaggaataaaagcctctctgtccccctacctaaaattaaccacaagcaatcatatcctttttgctgacaactgattatgtcctctcttaacatgcatctaagcctggaaagatcatcctgctaaaaagtatgaaggaaattcttcaggacacattagtgggaaatagaatatatttcaagcatcacagcttaaggtttatatgtgcttaaactatacaactgttttgagaatttcaaatgagtataggttttgttttcactgtttaaagaaagtttgataaaaaattggcttaaattaaaaattaaaatacttaataattttttaaaatgtagaacaagtgtgcagaatactggccgtcaatggaagagggcactcgggcttttggagatgttgttgtaaagatcaaccagcacaaaagatgtccagattacatcattcagaaattgaacattgtaaatgtgagtttgctttttacataatttttgttttgatacttttttataaaaatataattatggaatattaaaagtgagaaaataaaatatatcaggaaaaattatttttgataacctttaggatgaaagctgtggttagaacaatgacaaaaatcaatagggtcaaatttaagtcactggtcaagacgtttttgtccaactcaaatcgaaagaattatactgtattaattaattatctgttttaattattaaaaaaagagggaaggtccattaaatgtgttgaaaatataatcaaattattaaaagaataagcaatttgtcttcattgtcagtgagttcctacttttatgaaaaaaaattatattatttccataagagaaatgacagcattagagaacactgtaagaagtataaagttctaactatgcagcagagatagaatgtttagttcagaaaataaggaggtcattgtggccttagataatagttaaaatagagatcgtcatgcatgttatataattccattatatgaaaaatccacaataggcaagtcaataaagacagaaagtagatcagtggttgcctggagctgaggaggtcaaacagaaatggggagtggctgcaaataagaacaggctttcattttgtgatggtgaaaatgttctataattagatattggtgatggttgtactatttagtgaatgtaatatgaataccaaattgtacattttaaactggtgaactttatggtatgtaaaatgtgtatctcttatttccaacaaatgaattttatttttaattttttggggtacatggtaggtgtgtatattcatggggtaaatgagatgttttgattgaggcatacaatgcataacaatcacatcagggtaaatggggcatccatcatcccaagcatttatcttttctttgtgttacaaacaacccagttatactcttttggttattttgaaatgtataataaattattgttgaatagtcaccctgttgtgctatcaaatacaaggtcttattcattttatctaattatatttttgtacacattaaccatcaccatttccacccctgccatacccttccaatcctttggtaaccatcattctactctgtatatccaagagttcagttattttaaattttggctcccacaaataagtaacaacatatgaagtttgtatttctgtgtctggcttatttcacttaacgtaagtcctccaggtccatccatgttgttgcaaatgactagatcttacccctttttatggctgaataatacttcattgtatatatgtactacattttgtttatccattcatcagtcaactgatgcttaggttgtttccaaaagttgactactatgaatagtgctccaataaacgtgggagtgcagattatctcttcaatctactgtttcctttctttgcggtatatacctagcagtgggattgctggatcatatggtagtgctatttttagtttttttgagaaacctccaaacagttctacatagttgttgtactaatttactttctcaccaacattgtctgagggttttctttccttcacatccttgcaagcattcattcttggctatcttttatatataagttgttataactggagcatagtgataacttaatgtagttttgatttgcatttctctgatagtaaataatgttgaccacctttttatttatctgtttaccatttgtatgtcttcttttgagaaatgtctattcagatcttttgcctatttaaaaatcagattattagatttttcattataaagttctgtaagcttcttatgtattctggatattaatgctttgtcagatggatagttggcaaatattttccctcattctgtggcttgtctcttcactttgttgattgttttctttgctatacagaagctttctaacttgatgtaattctacttgttcatttttgctatggttgcctgtgcttgtggggtattgttgaataaaactttgcacaaaccaatgccctggagagtttccccaacattttcttttagtagtttcatagattaaggtcttagatctaagtctaatccattttttttatttaatgtttgtatacagcaagagatagggctttagtttcattcttccacatatgaatatccagttttcacagtacaatctattgtggagactgtcctttccccaatgcatattctgggtacctgtatcaaaaatgagtccactgtagagttgtttcattgctctatgtatgtttttatgccagtaccatgctgttctggttactatagctctgaagtataatttcaaattaggtattgtgattcctctagttttgttcttttcactcaggatggctttggctattctgggtcttttgtggtttcatataaatattaggattattttttctatttgtaaagaacattattggtattttgatagatattgcattgaatctgtagatagttttgagtagtatggacattttaataatactgagtctttcaattcatgaacatggaatagctttccattttttatgtcctcttcaatttcttgcatcaatgtttcatagttttcattgtagagatctttcacttctttggttaagtttattcctaggtatttatgttgtttttatctattgcaaacgagattactttcttgatttctttttcagattgttcaatgttagcatataaaaacactgcttgttttaatgttgattttatatctcatgaccttactgaatttgttaatcagttctaatagttttttggtggagtatttaggtttttccaaatataagataatggaatgtgcaaacaagtataattggacttcttcctttccaatttggatgccttgtgtttctttctcttgtctgatggctctagctgggacttccagttgaacaacagtggtgaaagtgggcatccttgtctttatccagatcttagaagaaaggctttcagttttttctcatttaatatgatgctagctgtgggtgtgtcatatatgactttcattctgttgaggtatattccttcgttaccctgttttttgaggtttcttattatgaagagatgttgaattttatggcataatttttcagcatcaattgaaatgatcatgtcttttgtccttcattctgttgatataatgtatcacaataattgatttgtgtatgttgaaccatccttgcatcccttggataaatgccacttgatcaggatgaatgatctttttaaagtgttgttgaattcagtttgctagtattttgttgaggatttttgcatcagtattcatcagggatattgaccggtagttttcttttttttgatgtgtctttgtctggttttggtatcagagtaatactggccttgcagaatgagtttggaagaattcctttctcttccattttttggaatagttagagtagaattggtactagttcttctttaaatgtttggtaaaatgtggtagtgaagccattaggtcccgggcttttctttgctgggaaacttttcatgacaacctccgtttcattacttgttgtctgttcaggttttgggtaccaaaaataatggcaacaacaacttttcaagacatggagagcaaaataacacatgaattgaaacaagaaaatggcaaaatgtggaggaatgaagttaaaatatagcattttcattatattacactttgcttgttagtttgtttacacaatgtctgttgtcttcagtgtaaaataatgcattataagatatgataaccccaaatccaaaagcattcaacagatacataaaaataaaaagcaagaaattaaaacagaccaccagagaaaatcaccttcacttaaaggaagacaggaagaaaagaaagaaggaagaggaggccacaaaacaaccataaaagacataacaaaatggcaggagtaagtctttatttatcagtaataacattgaatatcagtagactaaactctctaaacaaaatacatagagtggctgaatagatattaataaaacaagacccaacaatctgttgcttacaagaaacattcttcacctgtaaagacacaaatagacttaaaataagagatggaaaattatattctttgtaaatggaaacctaaaaagagaaggagtacctatacttatataacacaggtatatttcaacacaaaaactaataaaagagacaccgattgtctctacataatgataaaggagtcaattcagcaagaggatataacaattgtaaatatatatgcaactaatactggagcacacagatatataaagcaaatattgttagagctaaagagagagatagactccaatacaataatagttggagacttcaacactctactttcagcattaggcagatcacccaggaagaaaatcaacaaagaaacattggtcttaatgtgcattgtagaccaaatgaacctaatagacatttatagaacacttcaaccaatggctgaagaatacacattcttctcctcagcccatggatcattctcagggacataccttatgttatgctacaaaacaagtcttacaaaattaaaaaaaaattatataaacttttctttgactacagtagaactagaaatcaataacaagaataagtttggaaactatacaaactcatggagagtgaacaatatattcctcaatgaccactgattcaatgaggaaatcactaaggaaattttaaaatttttcaaaacaaatgaaaatggaaacacaacaaaccaaatcctgtgtgatacagtgaaagcagtactaagagaaaagtttgtaagagtaagcacctacattaaaaaagaaaaatttcaaataaacaacataatgatacatttcaaagaactagaaaagcaagagcaaactgaactgtaaattagaagaaaaaataataaagatcaaagtagaaataaatgaaactgaaataaaaaaatacaaagcatcaatgaaataaaatgttgtttttaaaaagagaaaattgacaggccaggtgcagtggctcatgcctgtaatcccagtactttaagaggacaagtcgggtgtatcatttgaggtcaggagtttgagaccagcctggccaatatggtgaaaccccgtctctactaaaaatacaaaaaaatattagccaggtgtggtggcatgcacctgtaatcccagttacttgggagactgaggcagtagaatcacttgaacctgggaagccgaggttgcagtgagccaagattgcatcattacactcaagcctgggctttgcagtgagactttatctcaaaaaaaaagataaaattgacaaacctttagtcagactaaggaaaaaagagtggagactcaaatgcgtacagtcagagatgaaaaaagagacattgccactgatacttcagaaatttaaaagattatgagatgctactatgagcagttatatgctaatgaattggaaaacttagaagaaatggataaattcctagatacatgcaacctatcaagattgtaaaatgtctcttgatagagctgtttaaaaaactacaagtctttacatgggggttaagattttctcttaatttcatttattgtagggcttttagtaatctaaattttatttttgtatagtctagctatattttctacaggagaaacagacttagtctatatatctccgtaggtcttcttaggtttccatggtattactaattgttatgtctatagagtgctgtgaaacaatcctatcaatagtttctggccaaacacttgtttgactaagccacaaaggcacctgctccatagatatgaggatatatttctagattgatgcctatctggctacattctgtagtctgggtttactggtgttaattaactcagtttgtgtgtttcttttgttatctaaatgtagatggttctttatacctggccatagaattatgacttatgcatcttatggtggttaccttgaaattagaacaaacctgagctctaatctggggctgactttcctcagtcgtctctctacattctgtgttgacaatgctaccatgtgaaggcctaaggaatacaatgttcatcaaataattaatcagactttgctcacatatgaattagttctgtttgctggcctatcaagcagaagtattttaaacagttgtgagaatgacctttaccaaatcattttaaacacaaatccaaaaagcttccacccatgcaccccacttttatggtgtatgtttattttgggttttttttgcttgacagcatgcaagttcctagaaattttggttatacttttaaagaaagtattaccttacttaccttactgttaagttattgcttacagggtagtacatgcaagtcctgcacaatatcttaactactagttattgattagaaaggaaaacacaaccatggttgagaaaatatataagacacctgaggaaactatgaactcttttgagtagtttatgtttacacgaggagactttgtactggtactcccttccacttatttatgtttcatagtttgctttaaaaaaatcatctcaaagaaaatattatctcttgactagaaaaaagaaaaagcaactggaagagaggtgactcacattcagttcaccagctggccagaccacggggtgcctgaggatcctcacttgctcctcaaactgagaaggagagtgaatgccttcagcaatttcttcagtggtcccattgtggtgcactgcaggtaggaaaaacgaacaaaaaaaaaaaacaacaacaaaaaaactccaacagaatccacctgcctagggctgttagagacatctttccctttggcaattgctattttgggaaacaacctatgggagaagcttagattcttatattggcttcacacctgacagcttttccatgatcatgcctctgcttttttttgcttggtttgccagtgctggtgttgggcgcacaggaacctatatcggaattgatgccatgctagaaggcctggaagccgagaacaaagtggatgtttatggttatgttgtcaagctaaggcgacagagatgcctgatggttcaagtagaggtatgttctaacctttagtgattattctcactttggttttttggacttaaatcttttccaagtgataataatgatattttttaaaaatccaaattcttcacaacctcaaacagtagatgatttcctgaaaactaaaacgtggtaatcaccagaaatacttagaagcatttttcattagtgcctaaaagtactgtggaagaaagatgaccacaaaatatataatttttaaaataatgaactactgttaacatatatcagattggcaaaaaaagtaaaaatgctgaaaatagatttggcatcatctcataaaattaaactgaagagacagaatagtatagtaatcaacagctggttttagaaactacacttacaggtttcaaatcttgcttttaattattaatacgagggtgagtggtattgtttattaagtaattttagtctgactgcacctcagttaagtcatctgtaaaatggagacaatgataatacctcacagacttataaccacaaaagtaatacaaataaagcacttaaacaagtccctggcccatgctatgcatttggtgattgtaagtgatggtaattactgaaaatgtctgtatttgacccagcaaaatcacatatatgcatatacccaagagaagcatcaactagaaacatttgcaagaatgtgcattgcattcagcattgtcaaaatagcaaaaaaaaaaaaaaaaaaaaagtgaaatacatatcaatgaaagaatggaaacaccgtaaatatgtatcaataggggaataggaagacaaaatgtggacatgtgaactctctgtacaacaaatgctatgttgtggtagaaagcaatgatctaggtttgtgtctgtctgtttggagagatgctcagatgaaaacaatgagtgagtaaagctgccatacgaaacattcaagatataatttatgtgatttaaaaaaaacatgaaaatgtacaatgcttgtgattacagatacatagatagcagtgtagaaacataaaaacaaattgttaaccaggtaaaaagaaattatttacagtggaaaataaagtacagtggaaagacagtgccaaactcagggaactaaaggtggcggttaaagaggattatcagaagtataccatttccttgaaaatactggattcaaacaaaataagcagtaaagagtagttaaatctgggtttggcccattggattacaaaaaaataattttcttattaaaagaatacttttcttattttaagttctaaaaactataaaaaaaggttttctaaggaataacaacttgcttttttatctcttgaatatactgtgaaatttattatagttttacattcagtaatttggcttactgacccaataatcactaaaggaagtaacatacaatgttctttagtttttaggaataaaagttgtgcaatacagagtacatggataatctatttgcaaagtaattcttttctgaaaaaataatctgaaaatagaatttgctcatattccagaaaactctgagagtgaacttccagaatatttaaatattatagatatcaatttactttgccatgaattgttccaatatgagcaaatttatggggaatgtatattttatttaaatatgacttggaggactctagattatcagttaactatctgtatttgttcttgaaattgtaggcccagtacatcttgatccatcaggctttggtggaatacaatcagtttggagaaacagaagtgaatttgtctgaattacatccatatctacataacatgaagaaaagggatccacccagtgagccgtctccactagaggctgaattccaggtaatgatagtgacaacaataataataattacagataacttttattcagtgtcatctactttctaggtgtttgctatgcacttgacatagtgcttgcatttagtcttcaccagaaccaaaggagcacagatgagaaaactaggacacagtgagttaagagaaatgcctgaatctacacaactattacataggagatttctttagacccagaaatctgattctattgctaatacttttagccattcctcattaagctggtataaaatgaagtgtcaaaataatagtatatagccacaaaactggtctgccaaaggcaatacagcatatcacctttaaaaatcgtatctggttttggtttgtaaaggaaatcattagaagagtttatgactgcttaggaagttgaactggctggagctggtagacacacagtaaaggataagtacatgtgtcttaacctatttattaggcaattattctcacagctaacctagcatgtagttcactataatttcagagagtttgcatagctgtcctcaaattgctcagttgtcaaaaaaatgttttgtgttttttttgttccacctatgatttccaggttactgagtcattccataatctaccaaactggtaaattcagagtttctaaagaccaggagtgtgcttttaatcacatgcagaaccatttaatgtttaggatcaaagtggggttaaggtgggggtggaggtggagcatgcaataatgaccaagtgactcaatcccccagaagacctgtacttataatggaagaactagcagacacagggtagtctcaaacagagtagtgttttattgttgttttcttgcttttctagctgataaattaaccttattcaatatacctgccctactaatccacataaacacataagctgttagagacagttatacatttaagttaaacattcttatgaatgtttatttactatagaaaagacagacaatttttttcactaaataaatgtgcttgagtttctgctatgtgccaagtacaattctaggcacaagagtcaaaatgatctgcaagtggacatgggaagaaggatgagaggatgtgatccagatcacagatggaagctgtgaaattattccatttaagcagacagtaagacagaagatgagagtagaaatgcaagtcggttggtaaatttggtattgggaagttgaggcagctcttgcctgatgatctttcatttttcaagaaaatgtgaggctaggtcatcagttgagagttgagagatacaagggcgagtagggcaaagaagagctcaatgcttgaagggtataaactagttacctcaaagtataaaaacaatctccctaggcagaggcagtaagattgccagaagttatcatttgatcacctgaaatttatgattataagtttaaagaggaattagtcagttggttgtattgttttctatggcagcattgagctctttgggggtagaggctgtgtatgcagatagttgagttaaacctatctaggttttgaaaagtgactatttgaaaatagtgaggcaaacgagttgagggtgtttacaaatgaatgatgactgaggtggaaaataaaaagcaaattggccacatgagggaggtgagagaaagtagtaaggataataagttggagactttgatagaattacagattgctaggttgaacatatcagaataaatgactaggaataataggggtaattttcaatagcacagatagttgaacttatgattttagaggtgatgtaatatttggaatgaaacctacaaaggtggaatgatgaaagtggatgactgggaagtggagggaaagtcatgggaggtgaagaagctaagaaatgaagagactagagtcttggatagattattcttgtcaatgttgaattaaccaaaaatgatgacagaccttggaaagaagagaatatacttagccaagcctaaaactaaatgaggtggagtgattcagaaatcaatacctgacacttcccagtgaagccggtggatagaagctagtatagtatgatggcaggaatatcaaagtgcttggttgatttgaaagcaaatgagtagaaatggtttgcaagtagaatcagggatcaaggagaacacgtatcttttcttgaagctgtgaggtaaatggggtgtgaggaggaaagtcaactttttcttaaaagggctgctgagttattggtggtgtccttagctgacatccaggttttaattggtggaaagaaaaaaaaaagggtgaagtgactgttgggagaagatgattaagataaatgggagttcacagatgacagacgatgggcatcagagggcagggaggaaggcactgatgggttagatgtaagagactgggttgtatctgaggatacaaataaccattcaggaataaaaatctggggaatgtggatgcactgggaagcttagacttgtgatggcaagtgaaacaggtagagatttaagagtgacagatcctttgtgtcttagatgaaggtgagccattaattccacctataatcctgagtattgctacagggcataggctgcctcggtgactacactcacaagagcacaaggtgttgtaacagtttccaaaacatctggtccttcatgcagctcatggtggtgttcaagtggcctaaaattcagtgatgatattttctttcactcaattacgtagcaaagaatgaggtttgaaacagggtgccataattagtttgaatgagggtactatgctgaaaaaatatatgtctatatacacacacgtatctacatgcgtgtgtgtgtatataaaatcttaccgaattgtacatgaggagccttctcagtttcagttatttgtaacattatctattatcattaaatattattcacttgacaaatacttatttaaggactagtggaaagactgtaggcaggggtgtcttccagaagaaattggtatttaaactgatacctagagggtaagaaaagttattagagcaaccaaaaggggaaagggtagttcaagcaagaaaaaaaaaaaaaagtgtttatgtgccaagagttgaagaacagcttggcccttccaagaattgaggaagctggtttggtagaagtattgagggacccagtaaggtgtaaggctggagaaacagtcaggggcgtatcaataaagactttttatgctattttgaggaggtttgttgtcctcttatagtgatggaaagctgttcatcttcagaagagcatcttctgttttgtgttttagaaggattagagcaggcgagattgaagacaaagaggccagttaggaaattgttgatgttttacaagcgagaaatgaaggcagactggattaagtaggaagaaagaaaactaaaaggatttgtgtatagaaatgatggatcttttctgactaattaggaactgtgggtgagaggaaagcaatctggaaggtgtaaacaaattaagaatgaactttcaaaacatgtgccaagtctcctaagaatgtgttgtctccaaagtttatttctgatcatttaaaataacttaccattgcttttgcaatatagatcaacatcggtctagtggtttcaatttatataagaacaaactatattatttttctatcaagcagctctgaagaaggagacatagtctgttacatatatatctttagtgcatactagccctgtcaaaaggactaaatgcctgagcaatttaaagaaaaaaaatcagaggcaaaccgaaaaattatggcctatagggagcatatgcaaatttcacaaaaattaatgaaatgcttttccttagggagcatcttatgatgcaataagccaatatttacattttaaaggagtttttctgttttttttttttttttcagagacttccttcatataggagctggaggacacagcacattggaaatcaagaagaaaataaaagtaaaaacaggaattctaatgtcatcccatgtatgtagtttatttttttattttttgtatcagataaagttaagctcttttggatttgtttaatgtgggacacacagtcatataaattatcttgaagcaagttttcaacatttggttgttaatagggaagaagttactaggtattaaaatactagttattgcaagaacttataatcctgaacatttacaatgggctttggagggtagactgtattcagtgttttctttttaccaattatttcagaaatgggttgtcataaaagagaaatatataaagctgggagaaaaaagagcaagtctcttttacccattttctttcatttttagtttatttcagttatttactccagggtaattgacaaatagtaaaaattacatccatttgttctctatatgtttcctttttatcccttataactgggaggttgaaagtaaggggaaaatactctataaattctaaatcttcaaatttaacagatcaaaatatgcacagtttcaatacttgaattctactatttaagcatattaaaatgatcacatatggtaattttattcagctgcataaactaaaattagcatggataaaatataacacaagttgataaattagatgaccaaataaatcagatcagtgcatggttgacctagttaattttcataggagtccttatgaatgtagtttaaaatatggaattgatggtgatatggttaatcaaatcatttgaccaagttattataaattatagaaattaagaaacagtgagaaattataggtcaaataattttctgggctaaataattaatcaaagctacccatataagattgttaatttaatattactggagtataattgagggaaaaaatctacgctatgtattttgtaaacttatatcaagcagaattataatagtccatgggaaattaaagtatatgtatcaaagattaaataatcatatataatgatatgatatctctttgttgtttgacatggaattatgttccatgttttttcctggaatcctttttcttagacttttgttgtataatttgtttatcgacaagtactgaattttatataggatcttatttcatgtagatcagtaagttttcataatacaatctgtccctttttaaatactttcaaatttccacatgacaatgaagaagaaatttaattttttcaaggaagacttactactgatttatttcacatagatgactataacagagtgccacttaaacatgagctggaaatgagtaaagagagtgagcatgattcagatgaatcctctgatgatgacagtgattcagaggaaccaagcaaatacatcaatgcatcttttataatggtaggtacttaaattgccaaaacccaagatccaaacattttaaaataatatctatgttattagggccattcattaagcgattttataaaagaataatgagcttggtcataactacatatagattgacatgagagtttcaatttcaatgctacaatttaacttaatgaaagatttaaaaatactataacctaataacctgagacaaaataagataatgctattggttatattttatgacaaatatagctataatcacatcaattttaaaaatagtaaaatttgagcaaatacaagtatttgaaaatgtttatacatactcagatacccaaattgtaggcaatgacaaatttgtatatttgtatggttagaaacttttcattcagataaactgaattattaggtgagtctgtgtcatatccccccacttttttaattaactgagaattcaaacaatgaaactttagtcatttattaaatatttattatttatacactgttggatttacttattttccaaagtttcctaaagcacacattcatagaatattagtttaattaggaaatataataagaatgtaaagacactaattaaaattagtatagacacgatgaaggtaatttgaaatgcttaagtaattcctttttacaatcacattaacctttatagagaaacaaaaatgtgtgtcttttgtggaaaggaaaatttgtttcgcaagatatgttgtaatcttgatttcacattattagctaagaattactattatctgtataattattttacatatagctattacattgtttcttgtaagaaacataagaatattactatttgtatgtaacagcattgatatcaaactgactatatttccaaatggttactttaagaatctactgagctctcttctgtagtaacgaagtcccaccctttttttgtctaaaaagagctactggaaacctgaagtgatgattgctgctcagggaccactgaaggagaccattggtgacttttggcagatgatcttccaaagaaaagtcaaagttattgttatgctgacagaactgaaacatggagaccaggtttgtacttttgaggattttcttttaagcctttctgtcataaaacgtcattctctagtcttggattgcttgcttcatcgccatacccacgtctttttttatccctccatcacataattctgtctgctcagtcttacccctttcaccctggtgttggcctccatcagctgtgtctggattctgacagtctctcctgtttgtcccctccagtcttgcatgctgctcacagattagccaggatgcagcaatgtcagcgtcacagcaaataacagctacattttcacgctgttttcctcattttctcaagataaaagccaagatctttttgtgatatccagcaccctggacaatcaccccctcatgtgtctttcatcttcctcccatttttatgttttccatcctctccactctggacaagcaggtttcatgcccaagcctaaacacgccatttgcattgtcatcactgagtctaaacttattgatattccatgtaactaaatgtgtgctgtcttccagttttgaccctattcttttaacaagaccaaactcctgaaaaatgtatctatatcatcctttctttattcccatataatatttattgccataaaagtctatagttgaaggtgaatctaagctataatttgatttttttacttaatgcttgtgacagatattttatccttttcttaatgtcttcagttattattaaaatttccctggtggtagatctcactcagctttagcaccaaccacattatctgacatatgttcaagcctattcagtgaataaccttataagtatgcaaaagatttatgcttttttatgcccctctctctcccctaaatctcactctttctcaccctcacctggtccccttcccctgtacatggaaagttgctttttatgttttttgttttaaaggaatataagtccagatttctagcatggaattcccacaatcctttccttcatataaattgtgaaagctgggaaacaggatggaagtaccggcaggactccctgtctttgtcagaaattgtggggttgtagttggtagacaacagtttgtagtaagaagaaacacttttgtggttcatctactcttcaatctggccctttccttagctatgtagacaaaatatataaagctgcttatggtgttggtcaacaagatgacagagacaaagctccaaaagatgcagcctccttcctcaagaaccactgaagggacagtgggacctgagttattgaaagggtcatgaataacattgactcatgccagccataaatattgaagaggtcatgataagcatgtggaaaagaggagcaaacctcaaagacctacactaaggaaaacagctgttccgggggtgtcccagtcacctcgattgtgctcagcttcccttttcttacacaaggaaacaccacatatttattaaatgggtcgccagcacttaaatagattctggatttttataagtaggtttcaattttagaacacaataattttcatttaatagaaaagaggcacagacagagaaagaaagggagaaagagggagactgatcctttgcatatttcaaataggaaacaaattgttgaattgtcttcttttatctaggaaatctgtgctcagtactggggagaaggaaagcaaacatatggagatattgaagttgacctgaaagacacagacaaatcttcaacttatacccttcgtgtctttgaactgagacattccaaggtatggaaacaatttggggagtatatttctttgatataatggatctggtagcaaaatgaatataaattactctatgcaggcaaggccatcatataaataatgtttcagaataacattttaaaattatttaaatagaagtaactgtgaagaaaatatgactatcaaattagaaaataagctgaacttcactccagttaatgctctcttcaattctgattttagaggaaagactctcgaactgtgtaccagtaccaatatacaaactggagtgtggagcagcttcctgcagaacccaaggaattaatctctatgattcaggtcgtcaaacaaaaacttccccagaagaattcctctgaagggaacaagcatcacaagagtacacctctactcattcactgcaggtgcgtgggatttggtagaatgtgctctcaaaatcataatgcttgacttctcggttcacatgttgtcttatctagttatcctcatatatgaaacacataaccacagtaaaaacttcttatggagtcggtcactctcttggttgtttccacaacacaactattgtagaaatataatagaagtgattatattatagtgcaataattttaagttgtgttttttaatacttggtgtcatgtcatctttgattccttggtagctaacattgagccaggaatgtcatttgtgtgaatgaattaatgaatggaagggtgtgtgaacagataggtagatgggtatcaccttacacatatacccatatacattgatctactctattaggtgtcacaaagacacctaatatgtttaatgaacacaaagtttattaaacatattttaagttaaatattaactgaaatcacaaagcttagcaattttgatttgaaactcattatttaattttctaaactgaaccaaaggcaaagattgtggtaatatcaataatactactagattttattagtttcttcatctgtgataggtgcttacatattcaccttaaataagcaatataattgaaagaaagatatataatataaaagtttacatgaaaaagaatattgaagtaaatgagaaacgaaaaatagtaaagtaaaatgagaaatgtttatctagtgaaaaacttttggaatttttgaaaaagtctaattgttattattggaattgcatatactagaatcaagccttaagaaatatatgaattttcagcatttatgtggaaagaaagctgaggaagggaagtttacactgtaaaactatatatgtttcttagaatatgatttatgtacaataactaaagtgtcctgctgataacatattgtttaaattgaatctttatgataatgctttatacttctcattgtttggtaaactatttgattgccctctttttagtgaataattctactaggtattacttttctactgatgcagaagtgaaaacatttgtgaaacgtggtagagaggcagaagagtgaagaagagcatgtgttctagtaatttacaaaatattaggtctaatatttctgattacatcagctttctcttctccaaatcttggtttccttatctatcatactggcattctgatattggtttcaacaacttcagatgtaaataaaaatgcattaaaatccataaaatactaaataaaagaaaatatatttgtaaagtcgaagacaaataagttttcaattccaggattatcacactcttaaattgaaaaatttgcctaaaaatgcatttagcgtaaataatttggttcttgaaagaggttggaataagataattatgataaacatgaagcaaaaaatatattctctctcttcctgtttttattctaatatcaccctttttggtgagaagtaggattattttctatcttttctttcttttatagggatggatctcagcaaacgggaatattttgtgctttgttaaatctcttagaaagtgcggaaacagaagaggtagtggatatttttcaagtggtaaaagctctacgcaaagctaggccaggcatggtttccacattcgtaagtatccttcaccattgcttttaacatgctcggaattttttttttctttttgacggtttccttttttcttttctcctctcctttcctctcgtttgttcttttttcccctttccttttctcttctctattttctttcctattcttttagcttttctacttttacatgataattcacattaaattattataagtctaaataagagcctaaagtttactagcactttgttgtgacagttcatgaagagcctttccctaaatgctcatgaatttcttaattttctttccttcactcctgtatcgatttgtgttgtgtaacaaaccacccccaaatttgggagcctaaacaaataacatttattatggttcagtagtctaatgatatgctggaatgttctgctggtgccctcaggctcaggcaatagagaccaggctgactcatgtgtctgccttcagctgatgtgtgccctacagtttggctggtctaaagtgacctacactgccagtaggctggcatgtggctgccatttagctatggcaacaacagtgagtgggccacatgtccctcctcatccagaagactagcccaggcctattcacattaaagcagcaagttccacaagggaaagaagacttgtgtgagaccacttgaggcccaggcttaaaagtgacacacatgtcttcttctgtatgttattagccaaataaataagtcataaagcctgcccagattcaaggggtagggaaatagactccacttcttgagagggcctgcaaattcacattgcaaagaaatgtggatacaggaaggaaaataagttttatattcttgtaatcgatctatcgtgtataccctctatgtggtagtaactgtagatggtcatctgggaattaatccttattcacagtgtaaacttaattactcactaaaatatataaagcttttaatcatgtatgatattgagatttcatatcttggtacttaaaaatgtatcaaatgcttgctatgtgctcttgctataaagagctaattggtatgagggaaagccaggtatttactaatcaatgtagtgagtaaaatgacagaaaaattataagaagaacatgaatgagggcatttaatttaaactttaggaatcaagaaacgcttctcgaagcagtgattcctgccctgattcttaaataatgtgtaggcattagacaggaggataagtacaaaacgtggcatcatgagcaaaggcatggaaatggcccatgagcggagtgaacactggtttggggttgctccaaggtaaagttcaaaaagtatcctgcagtcaaccctttagcaccataaagaaactaaattatttagatgtttttatgagaacatatcaaaaagtacttttctgtcatccaatacttccacaaataaatcattagttcttgctaatcttcatctggcataaaaataatgacatcaactttcttcatgtaatttcccacttaattcctttactaggagcaatatcaattcctatatgacgtcattgccagcacctaccctgctcagaatggacaagtaaagaaaaacaaccatcaagaagataaaattgaatttgataatgaagtggacaaagtaaagcaggatgctaattgtgttaatccacttggtgccccagaaaagctccctgaagcaaaggaacaggctgaaggttctgaacccacgagtggcactgaggggccagaacattctgtcaatggtcctgcaagtccagctttaaatcaaggttcataggaaaagacataaatgaggaaactccaaacctcctgttagctgttatttctatttttgtagaagtaggaagtgaaaataggtatacagtggattaattaaatgcagcgaaccaatatttgtagaagggttatattttactactgtggaaaaatatttaagatagttttgccagaacagtttgtacagacgtatgcttattttaaaattttatctcttattcagtaaaaaacaacttctttgtaatcgttatgtgtgtatatgtatgtgtgtatgggtgtgtgtttgtgtgagagacagagaaagagagagaattctttcaagtgaatctaaaagcttttgcttttcctttgtttttatgaagaaaaaatacattttatattagaagtgttaacttagcttgaaggatctgtttttaaaaatcataaactgtgtgcagactcaataaaatcatgtacatttctgaaatgacctcaagatgtcctccttgttctactcatatatatctatcttatatagtttactattttacttctagagatagtacataaaggtggtatgtgtgtgtatgctactacaaaaaagttgttaactaaattaacattgggaaatcttatattccatatattagcatttagtccaatgtctttttaagcttatttaattaaaaaatttccagtgagcttatcatgctgtctttacatggggttttcaattttgcatgctcgattattccctgtacaatatttaaaatttattgcttgatacttttgacaacaaattaggttttgtacaattgaacttaaataaatgtcattaaaataaataaatgcaatatgtattaatattcattgtataaaaatagaagaatacaaacatatttgttaaatatttacatatgaaatttaatatagctatttttatggaatttttcattgatatgaaaaatatgatattgcatatgcatagttcccatgttaaatcccattcataactttcattaaagcatttactttgaatttctccaatgcttagaatgtttttaccaggaatggatgtcgctaatcataataaaattcaaccattatttttttcttgtttataatacattgtgttatatgttcaaatatgaaatgtgtatgcacctattgaaatatgtttaatgcatttattaacatttgcaggacacttttacaggccccaattatccaatagtctaataattgtttaagatctag

SEQ ID NO: 2 - DNA, 2625 bp, Homo sapiens
  DNA (1)..(2625): CD68
ttaattacaaaaactaatgactaagagagaggtggctagagctgaggcccctgagtcaggctgtgggtgggatcatctccagtacaggaagtgagactttcatttcctcctttccaagagagggctgagggagcagggttgagcaactggtgcagacagcctagctggactttgggtgaggcggttcagccatgaggctggctgtgcttttctcgggggccctgctggggctactggcaggtaaggaggaaggaggctgaggggagggggcccctgggagggagcctgccctgggttgctaaccatctcctctctgccaaaagcccaggggacagggaatgactgtcctcacaaaaaatcagctactttgctgccatccttcacggtgacacccacggttacagagagcactggaacaaccagccacaggactaccaagagccacaaaaccaccactcacaggacaaccaccacaggcaccaccagccacggacccacgactgccactcacaaccccaccaccaccagccatggaaacgtcacagttcatccaacaagcaatagcactgccaccagccagggaccctcaactgccactcacagtcctgccaccactagtcatggaaatgccacggttcatccaacaagcaacagcactgccaccagcccaggattcaccagttctgcccacccagaaccacctccaccctctccgagtcctagcccaacctccaaggagaccattggagactacacgtggaccaatggttcccagccctgtgtccacctccaagcccagattcagattcgagtcatgtacacaacccagggtggaggagaggtaaagctaaaactgggggatgagaggggagggaggcaggactggatataggctcagagggaagaaggaagaggggacagggaaccttggccggcatcgcatgcagtcttgtgaccttccagtctttaacttccgcaggcctggggcatctctgtactgaaccccaacaaaaccaaggtccagggaagctgtgagggtgcccatccccacctgcttctctcattcccctatggacacctcagctttggattcatgcaggtatagccatgacctcagtctcacccctcactcagcctcccggcgcccctcccctcccaatcccacacgctactccttcctctgtggagagggataccacctgcgccttcctcttcgccccacaggacctccagcagaaggttgtctacctgagctacatggcggtggagtacaatgtgtccttcccccacgcagcacgtaagtaacctccttccctttctcattgctaccactagacgccagggttcctgaaaggactaagctggggccagggaggtggataggatctgacccttcctcactcctccagagtggacattctcggctcagaatgcatcccttcgagatctccaagcacccctggggcagagcttcagttgcagcaactcgagcatcattctttcaccagctgtccacctcgacctgctctccctgaggctccaggctgctcagctgccccacacaggggtctttgggcaaagtaagacctacctactccttccctcctagaatcctcccactgcactgaaaaccccttccccaggcccataagccactcatctctcttcttaaccccccaaatctcgctctcccagcttgtcatggctacagggcagctttctttccatcctctacaagactctgccagtttcccccttttatcactgctgagtcactgcggtgagctcctcaccaatctcctactccccagcatccccccattccctcctcccacctttatcccaaccagcacgtcactgcaaatacctacctgccctatccttccgccaggtttctcctgccccagtgaccggtccatcttgctgcctctcatcatcggcctgatccttcttggcctcctcgccctggtgcttattgctttctgcatcatccggagacgcccatccgcctaccaggccctctgagcatttgcttcaaaccccagggcactgagggggttggggtgtggtgggggggtacccttatttcctcgacacgcaactggctcaaagacaatgttattttccttccctttcttgaagaacaaaaagaaagccgggcatgacggctcatgcctgtaatcccagcactttgggaggctgaggcaggtggatcactggaggtcaggagtttgagaccagcctggccaacatggtgaaaccctgtctctactaaaaatacaattagccaggtgtggcggcgtaatcccagctggcctgtaatcccagctacttgggaggctgaggcagaactgcttgaacccaggaggtggaggttgcagtgagccgtcatcgcgccactaagccaagatcgcgccactgcactccagcctgggcgacagagccagactgtctcaaataaataaatatgagataatgcagtcgggagaagggagggagagaattttattaaatgtgacgaactgccccccccccccccccagcaggagagcagcaaaatttatgcaaatctttgacggggttttccttgtcctgccaggattaaaagccatgagtttcttgtca

SEQ ID NO: 3 - DNA, 9335 bp, Homo sapiens
  DNA (1)..(9335): Vimentine
gcctctccaaaggctgcagaagtttcttgctaacaaaaagtccgcacattcgagcaaagacaggctttagcgagttattaaaaacttaggggcgctcttgtcccccacagggcccgaccgcacacagcaaggcgatggcccagctgtaagttggtagcactgagaactagcagcgcgcgcggagcccgctgagacttgaatcaatctggtctaacggtttcccctaaaccgctaggagccctcaatcggcgggacagcagggcgcggtgagtcaccgccggtgactaagcgaccccacccctctccctcgggctttcctctgccaccgccgtctcgcaactcccgccgtccgaagctggactgagcccgttaggtccctcgacagaacctcccctccccccaacatctctccgccaaggcaagtcgatggacagaggcgcgggccggagcagcccccctttccaagcgggcggcgcgcgaggctgcggcgaggcctgagccctgcgttcctgcgctgtgcgcgcccccaccccgcgttccaatctcaggcgctctttgtttctttctccgcgacttcagatctgagggattccttactctttcctcttcccgctcctttgcccgcgggtctccccgcctgaccgcagccccgagaccgccgcgcacctcctcccacgcccctttggcgtggtgccaccggacccctctggttcagtcccaggcggacccccccctcaccgcgcgaccccgcctttttcagcaccccagggtgagcccagctcagactatcatccggaaagcccccaaaagtcccagcccagcgctgaagtaacgggaccatgcccagtcccaggccccggagcaggaaggctcgagggcgcccccaccccacccgcccaccctccccgcttctcgctaggtccctattggctggcgcgctccgcggctgggatggcagtgggaggggaccctctttcctaacggggttataaaaacagcgccctcggcggggtccagtcctctgccactctcgctccgaggtccccgcgccagagacgcagccgcgctcccaccacccacacccaccgcgccctcgttcgcctcttctccgggagccagtccgcgccaccgccgccgcccaggccatcgccaccctccgcagccatgtccaccaggtccgtgtcctcgtcctcctaccgcaggatgttcggcggcccgggcaccgcgagccggccgagctccagccggagctacgtgactacgtccacccgcacctacagcctgggcagcgcgctgcgccccagcaccagccgcagcctctacgcctcgtccccgggcggcgtgtatgccacgcgctcctctgccgtgcgcctgcggagcagcgtgcccggggtgcggctcctgcaggactcggtggacttctcgctggccgacgccatcaacaccgagttcaagaacacccgcaccaacgagaaggtggagctgcaggagctgaatgaccgcttcgccaactacatcgacaaggtgcgcttcctggagcagcagaataagatcctgctggccgagctcgagcagctcaagggccaaggcaagtcgcgcctgggggacctctacgaggaggagatgcgggagctgcgccggcaggtggaccagctaaccaacgacaaagcccgcgtcgaggtggagcgcgacaacctggccgaggacatcatgcgcctccgggagaagtaaggctgcgcccatgcaagtagctgggcctcgggagggggctggagggagaggggaacgcccccccggcccccgcgagagctgccacgcccttggggatgtggccggggggaggcctgccagggagacagcggagagcggggctgtggctgtggtggcgcagccccgcccagaacccagaccttgcagttcgcatttcctcctctgtccccacacattgcccaaggacgctccgtttcaagttacagatttcttaaaactaccactttgtgtgcagttgaaggcccttgggcacaatgagagccagtcctccaaactttcagaaagtttcctgccccttctggcaggctgccaatcaccgggcgggagaaggaaggaggggaaggcggtggagggagcgagacaaagggatggtccctcgggggcggggatggcggggctgtcctgtaggtctgtgcggccaccgtgattgcccctctgcgcggtgcccgaagtcccgctgaaacctgccgagggcagcaggtctgaaagctgcaggcgctagttgcgcggaggtggcgcagctgctctggaggcgcagagcgaatacgtggtgtttgggtgtggccgccccgcccctggcggtttcctcgttcccctttggttaatgcgcaactgtttcagattgcaggaggagatgcttcagagagaggaagccgaaaacaccctgcaatctttcagacaggtttgtagactctcttcccactcgcagccgcctgaccccacccaacacaacccacgagcaattctaaaagttgcttaactcacgtctaaaaagtgcaaaacttcagggctgcgcgtaaagccctctagtggcgggaagaccacaggttggagcttctcatgattagaaaaatattaataaaaccccttgagcgattttttttttttttttgagacggagtcttactctgtcgcccaggctggagtgcagtggcgagatcttggctcactgcatcctccgcctcccgggttcaagcgatccttgaatgatttctaagcagttccttgggacataaagaaaaatcttttaactttttactttgtttcccaaatgttgcacagttttgcaacacattgaccttctggtttcgaacggttacaattttagattgtggtttgccaaagtcaagttgcttaatttttacaaggccacaaaaagcgcaattatgccctgcagtttaaaatggaaaacgtgttggaagataagaaaacttagtttccaactggaatggagccagcaagtttcttttcttctttgcaaattctattgtgtcattaaagttcgatggaagtatcactatgcacaactattttgtgatctaataagggtgaaaaggagccatctgtccccttggctaaggggtattaatggtttctatgggcttcactatggaatgtagatacagacattctggcaaatgtggtggctctggacagaaataataggagtctttgtattcccagggaagctttgcaacaggctacattcttactgaatatgtaatgatgtaagcacggttctaattggacacaagtatttgctaacatccgttatctaatatctggcccagacttgagaagtaggtaatgtaaaaagtttttaaagctacaagcatacctcacattttaaaagtcctttcttgattgggttcttgtgttctttagcactcttgccataaaaaataataacagtaataaacccaaggctgaaaaactgaattttaactaaagggtttttgtgcgtgttttttttttttttcaccaaaattagatggacttacagaatttttaacttaaaattggaatccaaaagccagaagatccccattatagtttatagttgtattccctggaatatttactgggattaactgcaaagcactctcagatgaatagtgtagtataacattttgaaactgaaatacatttaccaaattaatttaaccacagcaatgtgtgtggttcattttagtccttgagcatttttgattatcatacctgtcatgttttctgcagtgtagtgagttaacataaaacaacatcaatacaaaagatcctctgtttcgagattaagcaaaattcctcattctcttcaatgtgatagaataccacattgatctttctttggaggttagtaaaatatcttttatgtatttttcagggcttaacaagtaaaaatcaatgttttcatcaagtctgatctttttgtcacccactcttcattcatttttccactaaggtgatagaaaagtctcaacagtttaagaccgtaaggctatgaactccaaatataattgctgacaagataagcaatcctcacgcatccttttgagaggaaataaaatcttagttgcaagattacatattctgatttggaatgctgagctttttaaatggaaatatagaaggacggctgaatcagcaaaaatcctttatgtagtttcattctttgcaagcttgaccagtcattctgaaacaggctaactgaactgatacagtggcaagtgaaaaagacatgcctttacaggatgagtcaaaggagttttagaagaaaaatccaccagagaaagccaagcaaatacagttcagagttacatttcttttccattttttcctgaactgaatctttggcatgcatatcctgaattgggttattgaatataaatctagccttgtacaatggatgccagatgactacatatttgctttggagcctaaggataagtttcaaaagatttgagtggagaagaaaagctaaaactcttgaagcacaagtttctgttctccatgtactcaagtgtacatgaagttgtgaaaatttgtccacctctatcatcatgttattccatgaaattacaaaacaaatcttaaaaatgttgtggcatagattttctagatttaaaaagtaattaaattaaatgaattactttattttttgagacagagtgtcactctgttgcccaggctggagtgcagtggcactatgttggctcactgcaacctctgcctcctgggttgaagaaattctcctgcctcaacctcccaagtagctgggactacaggcatgtgccaccacacccagctaatttttgtatttttggtagagacggggtttcgccatgttggctaggctggtctcgaactcctgacctcaagtgatccacccgtctcagcctcccaaagtgctgggattacaggcataagccaccatgaccagccttaaaaagtaattttaaaatatcactggtaaaatgtggattcagtcatgattgagtgcagtttaccatgtgtgtggacatttatttattttaaaattgtctgatcaccaccttgagtaaaacacaagcagtcacaattaaaatatattagtgagcaggagaaagcacagcatattatagcactgaatgatttataaacctattccagggtcataaaatgtgtcaacggcttttctatagtaaggagactaggttcagatggttaatctaagacaaataaatgagataagccatacacttttacatcctccatgtcctgtcttttctctgttcaaaataggatgttgacaatgcgtctctggcacgtcttgaccttgaacgcaaagtggaatctttgcaagaagagattgcctttttgaagaaactccacgaagaggttagtggagtgactttcggggaatgaatgagggtaaggcagcccccacggttggcagagctgaccgtctgtctgttctttttgcaggaaatccaggagctgcaggctcagattcaggaacagcatgtccaaatcgatgtggatgtttccaagcctgacctcacggctgccctgcgtgacgtacgtcagcaatatgaaagtgtggctgccaagaacctgcaggaggcagaagaatggtacaaatccaaggtaggaaacaaatcagtgcggcttcaaccaaagaaaagcattgtgttctcaaaaccccatacctgtgtgtgattcctaaatatcctctagctccaatgcaaagctggctttgacttcttgctcatattgtgtttgccaccacagcctccccaccactcacatcacctcctttatttatttatttattttcttatttatttatgagacagagtcttgctctactgcccaggctggagtgcagtggcaacatcttggcacactgcaacctccgcctcccaggttcaagtgattctcctgcctcagccccctaagagctggaaccacaggcaagcaccaccatgcccggctaatttttgtatttttagtagagatggggtttcaccatgttgaccaggcttctctcaaactcctgacctcaggtgatccaccctcctcagcctcccaaaatgttgggattacaggcatgcgccaccacgcctggccacatcacctccttcagaatagcagactctcttccccctaaccttgcctccaagtaaaccccaatgccatacctttgacctccactgtgttgaaatgagcactgtagagtgaactctgaaaatactaatgtcagtactccactgctctttccctggctttcaaaacagaaatttaaacctatactggaagacattcagtgagaaatatgattttttttttctaagagagtcaaaagacttgaatgtgagcaatctacatttctgttttcttcccaacagtttgctgacctctctgaggctgccaaccggaacaatgacgccctgcgccaggcaaagcaggagtccactgagtaccggagacaggtgcagtccctcacctgtgaagtggatgcccttaaaggaaccgtgagtaccaaccctgcagtaaaagagggaaaataatgacccattctgctgactaggctcatgatgatacctgaacaaaatgttgagtgagtaaaaatgtatatcataatgcaaagaaaatgagttatcaagacagactcaaaagggacttcatggaactcttgaaggttttagcttgcctatatcattgcttctaatatgaaggacttggtactcgcattctccacctaaaattagagtggtcgccatttgccgctaatggaaattattgcagaaggtctgtaaatggttctgggaacagctgggtttttctgagaaataacaccagacatctttctcaccccctgcagaatgagtccctggaacgccagatgcgtgaaatggaagagaactttgccgttgaagctgctaactaccaagacactattggccgcctgcaggatgagattcagaatatgaaggaggaaatggctcgtcaccttcgtgaataccaagacctgctcaatgttaagatggcccttgacattgagattgccacctacaggaagctgctggaaggcgaggagagcaggtagggaactcagacttggatgcgtgaactaatggtgaccatttgttaggccctgtgccactgggctctaagcagtgtcacatttaatctttagaaagtttctttgaggtaactgctttccactttttgtagaggaggaatttgaattgagagagagtaagtgacttgctgaaaaagggttaatcaacagcagagctgggatttgaacccataactctgtcaaagcctccactcctaactcctgttcatgctcctgtggagaaaatgcttgtagtaacatattttaaatgtactaacaagaccagtcatgggaaaatgtttctgagacaaatctctagtttatgatttaaaacagtacgttttcttacgtgacgaaaacaaaaagtgtgttaatttgttcccagtggttgaagttatttgccaacaattttactgtttctcttcatctgtttataggatttctctgcctcttccaaacttttcctccctgaacctgaggggtaagcattttatttccctttaggaaaaacgtcagctgcttgtaaccactgtgtttatgtcaaagcattcattttttttaggatatctgaaaaaatgccatataagagaaaactctataaaacatctataattttcgaacccaagtacactcttgcattctatgctttaagttaaatgcaaactcctttttccttcttcctgctgcaagtactatctcatcctgatgctcaagagtgtcagggcctgggtttccaaacagagactaccctaaaattatttggcgagtagtactttacacaattgcctctcccccacaaatcataattgtttcagtaaaatggttacttggtttttccaagaaaaaactcgtttttactcatttttggcctgtttgtttatttagaaactaatctggattcactccctctggttgatacccactcaaaaaggacacttctgattaagacggttgaaactagagatggacaggttggtatcttttaaggaaaaaatagggtaatctcagacaggagttgatatattttaaaatcagtgaatctgaatctcagatacagctggctaatttgagaggttcaggtttcattcatgcctactaaaaaaagaataggcttcttcttccagcagtacacacagccaactaattatttggctcctggatgtgaagttgagatagcagtcttcctgtgctccagaattagtgatttgctttggtgcttaatttgaagtgggagtaagcttccttaaaccacttcctaaagcagctacatgaaacagcttcactagactacctcaatatgaggaatgttttgatcctggacatatggtgtcttcctacctccatactttatagattcctaaacccatctatataatacaagcatgtgccatacgatcatttagtttcttattacctccctatgccaggaaagaaatagttgcaatttattgtagtcatcatgaaatcttcccttgcacataaatttaaaatgtacctgctgcacattttaatatgtcttaattgcttttaaacttggctgtattgtgtacaactattataccatcttttataaacacagttttttaagaaatttctttttgtaagttacaacattccactggatccttatattgcctgtagtggaagagggtcttgtgtgtctgccccttctagttttcactcatgcagaagcaacataaccttctgatttgcacaataaattacatatatttagcaggatttttatttgccgtgatatataggataatttagtctttggcatgtggcattatatttattttggtttttttttttaaacaggttatcaacgaaacttctcagcatcacgatgaccttgaataaaaattgcacacactcagtgcagcaatatattaccagcaagaataaaaaagaaatccatatcttaaagaaacagctttcaagtgcctttctgcagtttttcaggagcgcaagatagatttggaataggaataagctctagttcttaacaaccgacactcctacaagatttagaaaaaagtttacaacataatctagtttacagaaaaatcttgtgctagaatactttttaaaaggtattttgaataccattaaaactgcttttttttttccagcaagtatccaaccaacttggttctgcttcaataaatctttggaaaaactc

SEQ ID NO: 4 - DNA, 11653 bp, Homo sapiens
  DNA (1)..(11653): Uroplakine 1A (UPK1A)
atggcgtctgcggcagcagcggaggccgagaagggatctccagttgtggtgggcctgctagttgtgggcaatatcattattctggtgagactcgccccagtgctgggagccgagtggttgtgtggtggggaggggacagtcctgagctcggggtgggggatgagggtccagaactgtctctcgggcagactcagtggtcagcacagcctgggttgaaatcccagctctgcctctccccagctctgtgaccttagcaagcgactgtccctctctgtgccttctttcctcatctatagactgtgtcctcattgtgtgggctgttgtcatgtggattaatccatgtgtggccctcagctcagagaaagtgcccgaccaatgctggctatcaccatcagcatcactatggatataaagtgacagcctggtgcacaggaggccacaagaaggaaaaacaacagtgtctttcaattaacattgggttttggttttgtgttttttgttttgttttgttttgttttgttttgttttgttttgtttttgagacggagtctcactctgttgcccaggctggagtgcagtggctgatctcagctaactgcaacctctaactcccgggctcaagtgattctcctgcctcagcctccagaatagctgggattacaggcgcacaccaccacgcccggctaattttttttttttcagacagattctccctttgtcacccaggctgaagtgcagtggcgagatctcggctcactgcatcctccacctcctgggctccagcaattctcctgcctcagcttcccgagcagctgggattacaggcacatgctaccacacccggctactttttgtatttttagaagagatggggtttcaccatgttggccaggctggtcttgaactcctgacctgaggtgatctgcccacctcagcctcccaaagtgttgggattacaggtgtaagccaccgcgactggccgtgtgtttgttttagagacagggtctcactctgttgaccaggctgcagtgcagtggtgtgatgcttgctcactgcagcctccaactcctgggctcaactgatcctcctgcctcagcctcccaagtagctgggactacaggtgcacatcaccacatctagctaatttttttattttttgtagagacggggtctcactattgcccaggctagtctcaaactcctgggctcaagcaatcctcccgcctcggcctcccacaatgctgggactgcaggtgtgagccaccttgcctggcccatttgtaatgtttatggccatggccatgttcccctcctcggggaataacagcactgtcaagggagggcagatggaccaagcatctcctctgtgccagtccactgctccagcctttccacgtggcatccccttttatccccgaagaaactggcagctggggcgtgggggtcggttgtctggctgggctgtctcttctctcctggcctctgctcaccctcatcgctgctcatggaaggcgaggtctttgcccactttactgagagggcagtggaggctccaaatggggagggaacttgctcgtggagatgcctggtgccagggctgctggccccgagcagaccttcctaacccaccgctctgtccagctgtcaggcctgtccctgtttgctgagaccatatgggtgacagccgaccagtaccgtgtatacccactgatgggagtctcaggcaaggatgacgtcttcgctggtgcctggattgccatcttctgcggcttctccttcttcatggtagccagttttggtgtgggtgccgcactctgccgccgccggtccatggtcctcacggtgagactccaggggttgggggatggggacactgaaaacggagttcagcatcactgagtcatagtagcaggtgcagccccagccactagtgtgagttccccatggtgtcacactcagggatcccaggcatcatctcattcagtcttcccacagcccaataacccaggcttgagtagcagagctgggattttttcttttttttttttttggtaaagatgggggtctcactatgttgcccaggctggtctcaaactcctggctcaaatgattctcctgcctcagcctcccaaagtgctgggattacaggcttgagcccctctacctgcacccagtgcagggctagaatttgaacccctgctagctgctttccagagtccatgctcatgaactctgccaataatagcacagctaccatttaataatggtttactacaagccacgagctgttctaaatggtttactggattagttcatttattcctcatagtccaccaagagatactgtcatcatcatgaccctgtttgatgaagattgaaactgaggctcagagaagtgaagtcacttatccagggtcacacattgagacaatggcagagccagtttcaacctgagcagatcggctcttgaggctgtgctcttaatctctgcccacaagaataacccatacttcccaagtgtctctcatgcacctgacactagggtaagcagtttagaaaatgagcttcgtggccaggcgcagtggctcatgcctgtaatcccagcacgtggggaggctgaggcggacagatcatttgaggtcgggagtccaagaccagactggccaacatggcgaaatcccatctctaaaaaaaaaaaaaaaaaaaaaattagccacgcatggtggcaggcacctgtaatccccgctactcaggaggctggggcggaagaatcactagaacccgggaggcagaggttgcagtgagccaagatcacaccactgcattccagcctggatgacaaagcgagactccatctcaaaaaaaaggaaagaaaatgagcttcctcaatcttgccagaagcccttcacagctagtgcttttcaacccatttaccagatgaggaaactgaggctcaaagaggctaacagcctctcccaggtgaccaggagagcagggattccaattcacggccccaatgacacagagacagcactgtgtttcctcgacagcagagggtttttcagattcccagaagcagccactcatttgatgaacaaatgcttatgagcaggagctacatgctgagccctacgctgggcactggggctctgtgctgagcgaaacataaaagcccttgacccagggaagtggtgctcagaggaggaagacagtgaacaggaggggaggtcaggagccgaggagggcgagggaagacctcactgccagggaaagcaaagacctagaggcactgggagcgaggcaggtgtgtaactggaggaagagccttccaggtggaggtggcagcaagggcaaaggctctgaggccagagcgggccaggagtccaaagcagctggagctgagtgaggaggaggttggggggtgagaggacatgaggcagacagatggggaggagaacagtgaggaatggggatgggaaagaagcaggagggaaggcaggtgttgtggactttggctttatcctgagtaagatggacccatagaccccctgctcccctcccctcccttcccctccccttccctcccctcccctctccttccttccttccttcgtttttctacacaggcaggtgttgtggactttggctttatcctgagtaagatggagccatggactcctcccctcccctcccctcccctcgcctcctctcccctcccctcccctcctttcccctcccctcccctcctctcccctccccacctccctccttccttccttcatttttctagacaggcaggtattgtggactttggctttatcctgggtacgatggagccatggacttccttcccttccttctttccctccctccctccctccctccctcccttccttccttccttcctttctttgtttctctagacagggtctcactctgttgcccagtttggagtgcagtggcacaatcatagctcattgccacctcgaactcttcatctcaaatgatcctcccacctcagcctcccaatgagctgggactacaagtgtgcatcaccatgtgcagctaatttttgtattttttgtagagatggagtctcactatggtgcccaggctggtctccaactcctggcctcaagtgagcctcccacctcagcctcccaaagtgttggaattacaggcatgagccaccacacctgccctcttattttcttatcctgtatttaattatctggcataacaatttaaccaaagccctaaaaagtcacccaactagttttaaaaattgtgtctgggccgggctcggtggctcacgcctgtaatcccagcagtttgggaggccgaggcaggtggatcacaaggtcaggagatcgagaccttcctggctaacacggtgaaatcccgtctttactaaaaaacaaaaaattaaccaggcgtggtggcgggcgcctgtagtcccagctactcgggaggctgaggcaggagaatggcgtgaacccgggaggcgcagcttgcagtgagcagagatcgcgccactgcactccagcctgggcgacagagcaagactctgtctcaaaaaaaaaaaaaaattgtgtctgtttccccattagtttgtcattaactaagacattttctccccaaatttctttttttttttttttttgagacggagtcttgctcagttgcccaggctggagtgcagtggtgcgatctcggctcactgcaagctccgcctcccgggttcacgccattctcctgcctcagcctcccgagtagctgggactacaggcacctgccaccacgcctggttaatttttttttttgtatttttagtagagatggggtttcgccgtgttagccaggatggtctcgatctcctgacctcgtgatccgcccacctcggcttcccaaagtgctgagattacaggcatgagccaccgtgcccggcccccaaatttcttacaggaaatttctaaagtagactagagtccgcagtatttgagccctgcatacctctcacctgatttcaacaacatcagctgcagactgcccgacattgtctcctctatcccccttctctcatactttttcttctgggtattttgaagcacattctagatgccaagtcacttgcctgtaaatactggagcacacatttctctgagtgataagcacattgttttaaagcagtcaggaggttgtgcaatgtcatccatctcccagcagcagagttcacacatccacacgcaacctcctgctgctttatagatgaaggtgccaggtgaggacatgaaaagaatttgcattaaacatcaactgacaagcttttttttttctcctgccctctgtgccgttggcacaacccaccaaattcaatcaagttcttctatatcttccaatacccagtctgtgtcaaatgtctctgattatctgagaacatcgttttatgttgtttgttttattttaagagacagggtctcactctgttgcccaggctggagtgtaatggcacaatctcggctcattgcaacctctgcctcctgggttcaagctattctcctatctcatcctcctgagtagctgggattacaggcacccatcaccatgcccagctaatttttgtatttttgcatttttagtagatggggtttcaccatattggtcaggctggtcttgaactcctgacctcaggtgatccacccgtctcaacctcccaaagtgttgggattacaggcgtaagccactgcacccacccttgtttgttttgttttaagagacagggttttgctctgttgcccaggcaggaatgcagtggtgcgatcatagctcgctgaggcctccaactactgggctcaaacgatcctccaacctcagcctcccaaatagctaggactaacactaccactagtagtaactatgcttaactaatttttttatttttattttttgtagcgacggggtctcactgtgttgcccaggctgatcttgaactccagggttcaagcaatcttcccatctcagcctcccaaagtgctgggattacaggtgtgagccaccaatgcccagccctaatttttgtatttttagtagagaaggggtttcaccatgttggccaggctggtctcgaactcctgactcaggtgatcgccccctcggcctcccaaagtgctgggattataggcgtgagccaccacgcctcgcctgtctcaaaaataaattaattaaattaaatatttcaaaatacagaaaagttggaagacaatacagcgaacacctgaacacccaccacatattatagatgctgctagtcacactgccccaaacttttttaaaacttgcatttccccagtgatgcttccctgacggggtgtggcttcacgggctctgcccgacgggccgtcctccctctgtctccccagtacctggtgctcatgctcatcgtctacatcttcgagtgcgcctcctgcatcacgtcctacacccaccgtgactacgtgagcccggcgaggcctggggaggggcctgacctgcatgggaggggcgagggtcccggcgcggcggggcggaggtcgtcctctctccccacccagccctgccggcccttgttcttccctgttctcctcagatggtgtccaacccatccctgatcaccaagcagatgctgaccttctacagcgcggacaccgaccagggccaggagctgacccgcctctgggaccgcgtcatgattgaggtgggcggggtggaccgggtgctgggagggccctgggctccgtccacagaggccgatagagctcccgatgtgccagcttttagaggagtgagtgccttaaagacatccgctcatgagatctctaggagagcagggctgcggtcatcaccgttctgcggatgagtaaacaggcccagaaagggaaagtcccttgcccgaggccacacagtcggtaagtggtgggagctgggattggaacccggcagcctagctcctgacctccctgctcttagcctacacatactacctcaacagaaatgttgataataacaatgatagtaacagcaccattcactgagctaggtttcacactgttcaaaggacttttatttttatattttgagatggggtcttgctctgttgcccaggctggagtgatcatagctcactgcaacctccaactcctgggctcaagtgatcctcccgcctcagcttcccgagtagctgggaatacaggtgcgccccaccacacccggctaagttttttaaattatcttttgtggagatgggggtcttgctctattgcccaggctggtctggaactcctgggctcaggattggagcgattctcccacctccgcctctcaaagtgccgagatcacaggcatgagccacgagtgcctggcctcaaagcacatttttttttttctttttatctttttttttttttttttttttttgagacagagtcttgctctgtcgcccaggctggaatgcagtggcgcgatctcggctcactgcaagctccgcctcccgggttcacgctattctcctgcctcagcctcccgaatagctgggactacaggcgcctgccaccgcgcccagctgattttttgtatttttagtagagatgggtgttagccaggatggtcttgatctcctgaccttgtgatccacctgcctcggcctcccaaagtgctgggattacaggcttgagccaccgtgcccagcctttcaaagcacttttaaagcttttttaatcctcacgaccactccataagggagatcggccttttagtgatgaggagaccaaagcaagaggttgaatatcttgcatgaggtcacacacctggtaggtcacagaactggaaggattcaaactcagacttccaggtttgaagagatacagtcttcctcaaatccaacatgatattgcactggaaaaggaagaaattggctgggtgcagtggctcaaacctataatcccaacactttgggaggcaaaggcgggcagatcacttgagttcaggggttcaagaccatcctggccaacatggtgaaaccctgtctctacaaaaaatacaaaaattagtcaggtgtagtagtgtgcgcctgtgattccagctacttgggaggctgaggcaggagaatcacttgaacccaggagggggaggttgcagtgagccaagatggcgccactgtactccagcctggacaacagagggagactccgtctcaaaaaaaaaaaaaaaaaagaagaagaaattgaggactcaaggaaaactgaggcgtcaatgtggcccaagtcctctagctagccaggatttgaacccatgtttgaagggtgcccaagcctatgttttcctcattcaggagccacaaattaaacacctggattccttaccaaggccaggaaaagccagaaatctgccctttttgtgttattttatcagcatagttgttgataaaaatattttattttattttattttttgagatggagtttcattcttgattcccaggctggagtgcagtggcacgatcttggctcactgcagtcgccacctcccggattcaagcaattctcctgccccagcctctcaagtagctgggattacaggcgcccaccaccacacccggcaaattttgtatttttagtagagacggggtttcatcatgttggtcaggctggtctcgaactcctgacctcaggtgatccatccacctcggcctcccagagagctgggattacaggcgtgagacaccgtgcccggcaaaaatattttaaaataagtcagaggtgcaggtttaatccaaatcccccatcagcctcctggtcctgggacaaatattgtctgcaccgtgctcacacacacagacacccaccggacacactcgcttggaggcccaggacatggggaagttgggcccagctgtgtcaaaggccaatcctgcccctccttgctgtgtgacctcaggcaagcaactgtcctctctgagcccgagcctgcctgaccccctgcttttcactctagcaagaatgctgtggcacatctggtcccatggactgggtgaacttcacgtcagccttccgggcggccactccggaggtggtgttcccctggcccccactgtgctgtcgccggacgggaaacttcatccccctcaacgaggagggctgccgcctggggcacatggactacctgttcaccaaggtgtggccgtctgccctgctccatctgtctatccatctgtctgtcttcctctggtctctgctccctctctgattctctctttctccctccctgtgtctgtccgtctagctttttccctctcctcttcccctctctgattttcttgttttctttttctttctttctttctttctttcttttttttttttcaagaccgagtcctgctctgtcacccaggctggagtacagtggcacaatctcagctcactgcagcgtctgcctcccgggttcaagggattctcccacctcagcttccagagcagctgggattacaggtgcgcaccaccctcttggctagtttttgtatttttagcagagacggggtttgaccatgttgtccaggctggtctcgaactcctgagctcaagtgatccacccacctcagcctcccaaagtgctcagattacaggcgtgagccaccacgctgggtcccctctctgattttctagtgctcccccaactctctctcaagtcagcaggatgcacccagggtctgtctgaaccagacctggcacctacaactttactcaggttgtccgagaataagagcaataatagggccgggcgcgatggctcatgcctgtaatctcagcactttgggaggctgaggagggcagatcacttgaggtcaagagttcgagaccagcctgaccaacatggcgaaaccccatctctactaaaaatgcaaaaattagcccagagcagtagcacgtgcctgtaatcccagctactcgggaggctgaggtaggagaatcacttgaactctggaggtgaaggttgcagtgagccgagattgtgccactgcaccccagcctgggcgacagagtgaaactccatctcaaacaaaaaaaaacaaaacaaaacatcaaacaaaacaatagagctaggcacgggggctcacgactgtaatcccagtactttgggaggccaaggcaggagcatcacttgaggtcagaagctcaagaccagcctgggcaacatatcaagaccccgtctctacaaaaaagtacagaaaattagccaggcgtggtggtgcgcgcctgtaatcccagctactggggaggctaaggcaggaggattgtttgagtctaggaggtcaaggctgcagagagctgtgatggtgccactgcactctagcctaggcaagagacttaaaaaaggcaagagactttaaaaaaaaaaaggccgggcgcgcacagtggctcatgcctgtaatcccagcactttgggagaccgagatgggaggatcacaagatcaggagttcgagaccagcctgaccaacatggtgaaaccccgtctctactaaaaatacaaaaattagccgggcgtagtggtgcacacctgtaatcccagctactcaggaggctgaggcaggagaattgcttgaacgcgggaggtaaaggtttcagtgagccgagatcatgccactgcactgtagcctgggtgacagagggagactgcgagactgtctccaaaaaaaaaaaaaagccagctgtaagatcaaaatcaccctcagattgtcatagccatcagcagggcggcacctacttgtgcagggcctgggttcaacatcagctccctggggccccgaaaccacccgaggaggtggacagtgccatggtccccattgcacaagtgagaaaaccaatgctcagggaaggtggtgactttcccaagggcgcacagtgactctcgctttcagcggctaccctcatgggcgtcttctcaaacttcccccatccccctgcccagggctgcttcgaacacatcggccacgccatcgacagctacacgtggggtatctcgtggtttgggtttgccatcctgatgtggacggtgagaggcggggagcccacaggctgggtgggctgggggtggggggcggagtgccctcatctcgctgcctcctcgccagctcccggtcatgctgatagccatgtatttctacaccatgctctgagggacaggaggggaaggcaacatacacaccccggactcctccgcatcctcctcctgcttcctccgctgggcctggatggctgcctcacctctcacctcccaacgtccctagcccttacgtccttccacttccaagatctttttccaggttcctgagccctactgtgtctcaggtgtgccctgaaaccccagggcttgtgtgcacatatccttagcccatctttcaagggacctctccatgatcccacctcccattcacagatacctctcttgtagctctctgacctcctccttcatggcaggcatcgccattcttgctgaaccgtttgtgattgccatttgagctctggaagcctctattgccatgagagttctgtcacggtcactttactgtccccatcatcacccagcacggggctaagcatatactagatagtcaataaataa

SEQ ID NO: 5 - DNA, 31576 bp, Homo sapiens
  DNA (1)..(31576): Uroplakine 1 B (UPK1B)
acctgggtcgggtgcagactgcggagcgggccctaccgtgtgcgcagaaagaggaggcgctgtgagtagaccgctttccctctgcagggaatctcccgggctcaagggctgggttgctctcctgggagggaagctagcagactgggagggaaaggggaagaagttagattcttgattcataaagtctgtcatttttttctttgtaatttagggtattgtgactgtcctgttctcttttactttgaaccgttggaattgctttcttaatacccttgatataagtcttgttctcattaaacttctggagatattacgcagccatcctgctttcaacctcagatatccccacagaaagaacaagaaaatccaagcaccccgagaaaccctatatctcctgattaaatcgcacatagacagtcacctttgtagacccccaatttccttgtggagtcagaaaagcaatagaaagtttaacgaaatagctcgtgttatttcttaataatctgttcaggctagcagagagaaagtttcttggtcttcttgtcagaaatcatttggtcctgccaacctgtaatgaaatgtgtgaagcaatttactcccagttattctctgcaaacacttctgcttaataaatgtgtcagttgaagtaagtcaacaaagtagctttatctacgcaatgttatttttacataatttgtttttactccttaccaattctttgctccaccatgatctgcaggacataaagatatttttcattctgatcacattttcacacaaaatacaaatttaagtttcaaataatgctagtattattttatgtttgcatttgtttataaacctaaaactccacttctaactagttttaaagatttttaagccatttaagaattcgtagccagtcacagtggcacatgcctgcagttccagctattcgggaagctgaggccacgtgatcaggagttctagtccaggctgggcaacatagtgagatcctgtctctaaaaaaaataaaaataaatttttaaagaagttttgttaacttgaatgtcttcttttaatgaaagacaacgtttcttgaacatttcttgcctgagttgctaagcacaacaggaaagaactcattaggttttatagatatacatactttgagtataaacaaaatttaggttacatagttttcagaccctatgaagaagtggattttctttttattaaccttctcagtgaggagaaaaatttcttactttgctttctgctccaacagattgttttgctttctgctataaaatagtctttaaaatcaactcacctattttttttttttttaactgctgggaagaatcatagacttttacatccaaaggggaccttagacatcatttaatcaaggggaaaaaaaagaaactcagaactttttttttcttttattttctttttttttttttttttttttttttttttttttttgagacggagtcactctgaggcccaggctggagtgcagtggcgtgatctctgctcactgcaagctctgcctcccgggtagatgccattctcctgcctcagcctcccgagtagctgggactacaggtgtctgccaccacgcccggccaattttttgtatttttagtagagacggggtttcaccgtgttagccaagatggtctcaatctcctgacctcgtgatccatccacctcagcctcccaaagtgctgagattacaggcttgagccaccgcacccggccaaaactcagaacttctttttgacttctcctgcttacaatcttaaccagagtaaacaccagccagcctttaaatatgctctggaatttgtgcctgatagccatgcaggctgcccacaaacttgatgggccaccattcaccaactgggacagagaccacattggtgagggggcaccatcatcacacaccgccctacccgcctgcccaccccctcccccccgccccaaggactctccatagtactcctgccctggagctgggcatctctctggcaatgcccacacctgaggccctcgtgcaactgagtgctcctgagccattgcttacagctagtccctgatttccaatgggtggatgactcccatcatactgggagcaccaggaatcaagagcagtgctgtccagtaaaactttctgtgatgagggaaatgttctagataatagacactaaccacatgtatctagggagtgcttgagatgtggttggagcaactgaggaactgatttttacttttatttaattgaattcttttgactttaaataactgcatgcaactactaactactgtattagtcaacacaggtttagagctttaaagcaagaaaaacttatgggcactgtgagccatgggtgacagccctgggagaaacctcctctttttgttatttccagggacttatcctaccttaagttgaagcagaccagcaattgttgtgacctacaatctccacacccatctttactctgagccaaggaagtgtctgttcttgtgctgagtttcagggtgagggctaaggcaatcgcatattgtgtttctttgtttcttcctctcctatttttccttttctttttttctcctttgttaattcaaatttctctagcatgaactaaagtttgaggtgtggtttgtgtgttctctggtacaacaaacttgggtgaggaaaagaggtaatgaacttgaaaaaatgatctcatgcttactgggcgagtctcacttctttttcttctgctttgcaaattggtttgtttagtgagcaattgtttttagacctttcaatgtgtctggaaacatcaacactacgggtatgattaatttttataggaaaacaaactgagtgaaagcacaataaagaaaaaacaagaaatataattctagctttaaaaaaatctgcactctttaaagcaaaggaactcccagggtattgagcaatttgagtaaatcatcatcataccaggccacagggcagttttcccacagggcggggtgcacaggggctattcctttacatggaaaatatttcgaggtgagttgcgtactttcagtctggggcgttccatctctaacgcgggcagttgctgctctgccctctgccttccaccgctttccacttgttaaatgtaactcatcccattggtttccttcccacccctgccagataagtaatccaatatagtcagggaggcattgttttagaataacgtggggagggttcagaagaccacatatctaaaacagtttctacatactgtgggctaaaagagaaggcaggaaagaggacacatcatatcattagaagtcagtatagccagagagacagacccaaacccccaaatcataagttacgaggtttgtctttttaggttctaccctctccttgggtctctttccttctcatggtgtcttccctcgccctttgaaaattaaataagagaagggagctgataaatgaggcattgacatggatggctcatgaaactcaatgtgcctcttttatatgagcttgcattttaatcaggaatgaaggagtgagtctcaaattgtggcattcagaagttagggtaaacggtgaggaagcctttgaatgaaggaaaaggatagaaggctttctccctgccagctttgtttatgtggctccctttctggcttatcttgtagtgagtctcatgggtaggctcacaggtgggaggtcaagagtttctcttaatttaaaaagacgtaaagggaagtggatctccctaccttaaaaagaataatcattagtgacaaaccccatagaaggctgggttaagagttaggaaacctggacttgaatcttaactcttttaataacacatcatgatcgtgaacaagtcactttctctctgtgagccttaaatttctcacctgtacaaagcctccaagtttgcagccagaactgatgtatcatgccgtgaacaggcacctggccaataactgtcctaggatgaatgacactttaatgtctctcaaattacatatcttctaagacaaacaaaaactaccaaaagtgtagtcattgacttctaagtgtgacacccgtcaattaatttaaaagtttataattttgctttttaatgcaattatttgttaaattggcttttttgatgcacagcaatccaatttttgtggcttcagaatatcttattaaacaaacttgggtgaagaaaagacgtaacaacgtaccagactatattgctgtggcagaggctagtatggaagaaaagccataaacacatatccacaatggtttcagcttccctggagagctatttgctataggcagagagagggatatagggaaggaaggataattctgggtaagagaagttgaggagagaagaggtttttcagctgggcttcggaaggtggtaaagagttcgataggcagaaatgggagaagggattccaaagacagggacaccctaagcacagcatggtggcatgaccaggacaccaaagggttgggggggtggggcacgcagtgaaaaatggcaggcaggccatttagaacctggatgggtgctgccttgaatacacactgaggagtttgtactttatctcttaggtggtccaaccactcctccactggctgaatggaaaatataatagttgggtctggccaaatactatagactggtctttcagaagggaacaggagcaaatctggattcaaagaaactggtcagcaacagagagtggggggacaagtgatgaacctggcaataggaagtaagtaggagctggtggctgggcttgtaagtgcagagggaatgaccgagggctctcctttgaatttaggctacagggaacctttgaagggttctaagcaggggggagatataaattcagagctgtgttttaggacagtggatctcaagattggctaagtggctggcacttggaagccatgtttatctttgtagaataccagaaaattttggtctactaaatttaaaataagtaagtagatcattttggcctaaattcataccaaaaactagattttagcatagacaggtggtagtagcatccacaatttaagaaaaatgtgtaagaggaaaatgtttaaaatcacaaatttttatagtaatttttcctcaaattaggaaatgactggaatcattcaatattggcatcaaaacatgttgtcccagtaaatggaacatctgtgttttggaggatcatttgagaacctctgcttgagaaagttcaccatggaagcactgtatggaatggaaacagaaaatgtttaattcatctgatccagaagttaggggctggcagtgggaattggtaaaatggtatcaggagacatcagaaaatgatcatatgtgcttctatcaaaaatatacatcaatcccaattgggatggtgtgttactcaaggttctttcagagatagaaccaaaaggagatacataaagagagagagaggcaacgtatggtggctcacgcctataatctccacactttggaaggccaagtcttgaggacaggagttcaagaccagcctgggcaacatgatgaaaccccttctctacaaaaaatttaaaaattagccagacattgtgcatgcacctgtggtcctagctacttgggaggctgaagcaggaggatcacttgagcctaggaagtcaaggctgcagtgagatatgattgtgccactgcactccctgggtgacacacaaagaccctgttgagagagagagagggagagagagagagggagatatatatatatatatatatatatatatatatatatatatatatattaattctaaggaattaacctatgtgatgtgattgtgggggctgacaagtccgaaatctatacagcaggtgggcaacctgaaaatttggggaagagttgatgttgcagtcttttttttttttttttttttgagacggagtctcgctctgtcgcccaggctggagttcagtggcctgatcttggctcactgcaagctcggcctcccgggttcacgccattctcctgcctcagcctcccaagtggctgggactacaggcgcctgccaccacgcccggctaactttgtatttttggtagagtcggggtttcaccgtgttagccaggatggtctccatctcctgacctcgtgatccacccgcctcggcctcccagagtgcggggattacaggcgtgagccaccacgcccggctttttttttttttttttttttttttttttttttttttgagacgagtgcaatggcgcaatctcggctcatggcaaactccgcctctcccgttcaagcgattctcccgcctcagcctcctgagtagctgggattacaggcatgcgccaccacccccagctaattttgtatttttagtagagacgaggtttctccgtgttggtcaggctggtctcgaactaccaacctcaggtgatctaccaacctcaggtgatctgcccacctcagcatcccaaagtgctgggattacaggcgtgagccaccgcgcttggcctgatgttgcagacttaaacctaaaatctgcatactgaaaacttaagagtttctctgttacagtcctcttagggcagaaatgctgcttcttcaggaaacatcagtttttgctcttaaggttttcggctgattggaggaggccagccacgttatggagggtaatctgctttactgctttactcaaagtctactgatttaaacgttaatcacatctaaagaatatcttcacagcaatatctagactgatatctgaccaaacaccatatccaagccaatcccaccatatcccagcaatatctagactgatactgaccaaacaccatatcccagccaagttgacatacaaaattaaccagcgcaaggtgttcattacaatacttctttatcaggcaggcagagacaaaactcaagaagctattaacaaaggcaaaactactaccaagccctagagaacaccacagtttatattctgtgtatagagaagtcaccatttgtccttcccttttgttctttctccgtgcctatcctctatggaaaggtcaacaaattcataatgtctttttttttttttaaatatccattagtgtggaactgtgtcaaagcttttcttttttaacctaaaaaaaagtgcattactctacccctatgcacaggcatttattaatcttcaaagaaccctaaacatcagccaggcctgatcttttccttttgtagaaattatgtcacctttcctctaagtgtgccaggaaagcagctcttcctaaagatccatccagctaatgtattataaaagtaaactcacttgtctcagttttccaggacttttctagacatcttccattgaatgaggggcagggggaagtctttgacacagactttgtaaggtcagcttacacgttgtgaccagtttttcaacatcacttttgagtgtcctcttacttcttgggtaactgtcttctgagctcagtaatttgcctatttctttcttttcctttagctctagaatagtagtttccaatcgttctggggctagctatgtgtttaggaggtttagagctggtgagaagatgctctgtgagcccaggattcctactctcgtttcagccagagaagtaccattctgatctgatttcatatattagagttccctactgaaatcatatttccctatttcctttgaaaatgttgctctgtatcaaaaaaataataataataaaccactggttttaggtaccttcaccaaccactgggctattagctctagtctgtctcctttataagacaaaaataagcaaaattagtattgggtaactaatattgtattaaaacttcacatatattctcatttaattttcatagtaacccttgaagttaagtattactatactcatttgaagataaagctcgagaagattaagtaacttcttggggtcacaaaactagtaagtggtagagctaagattcaaacccaggtctatccaaagcccacattcgttccacttcaccatattctctaacttgctcttcaacaaagttctaggcaaattattaatctgcacactcatttattcaaataaacattatttatttactttatctttttatttagcaaaacaattgagtgcgcctactacatgtcaggtactatgccactttggacctagaaagacaaataaaacagggtcccaaatgcctcctcctactttggagactcttgcaataaagtgcaggatgcccttcacaggttggcaatgggaggaaagaatgcaaaagggcagcagagcagaatactctctgagtaatgtctgtgtcagggagaaagtggccccaggacaaggacaacctcaggggccatctctgcatcaacttgcagtgtggggcagaggccttagagctggccaaaggcagagggatgaggcccaatggcgagtgttaactgttcaggaatgctaatggcatgcaaggcgggcccctcccatgtggatgtgcagcttggtacctgactctggccgcaccccaagcacaactaggaagtgtttttccttttctctcatgaattcatctatggaaaataaaaagaagtacaaatgggtatcttgtgtaagccctcctggtccctcgagcagagcagcccctgtgcagtgaacagagggaaggtggaaggaaggctgcttctcctcaatctaagagcccttggctgtgagaccagtcactgttaaaacctcccttctatccccctggggtcactgatatataaaacaaaatcataacccaataccctgcccttcctaaatatcctctggttataattaatagtttcttatatgtgtaaacaatcttagtgcttacctattacttttgtatcttttatctcatttagtgatcacagcaactccatctaacaagttattgtctactaattttataaacgaggaagtagatactaaggaaaacattgtccaactttacacagtaatgataatgacagcacaaagctgggacttgaactctggcattctgatgccaagtccagtgtggtcaccattatactacagatattagactatgctgtgagccactggaagcctacacttggctccctcttgacatctgtggccatttgggggatgcagcaaatgttttaggtcctctggacaccaacctagtctaaaatacaagtggccaagtagaagctatgaaatgctaacctctcattgacttgcacattgcacattttacttctaagaattctggtcttgggggtaggtggatgagctgtagatttttgatacatccagacaggttttctggaaaagcatgtgggtacagcactgagtttgggggaaatatgcaaatatgagcatcgtgtccaggggctaaagagacaagaagctggagatgtaagtgaagaaaagcctagtgtttctgacctttgcaaaggtagagtctcctgagcagggaaatgtgtctgttctctccactccaggtgtttctatttctactgaaagcatttgctatgtagcaagactttataaactgtagagtgtttagcaaatgatctggcgccaggcagacctgtgtttcagtctcagcttctgcactttctagcaatgtggccttgggcaaattaatctctccaagcttccctttttttttgttttttttttttttggagatggagttttgctctgttgcccagtgcagtggcccaatcatggctcaccacaacctccacctcccaggttcaagcgattctcctgactcagcctcccaagtagctgggattacaggcacccgccaccatgctcggctaatttttgtatttttagtagagacggggttttgccatgttggccaggctggtctcgaactcctcacctcaggtgatctgcccacctcagcctcccaaagtgctgggattacaggcgtgaaccaccatgcccggccccttttctttatacaaacaatggcaagacaacagcttctccccctagatccttcagaagcaacatagccctgattttagcctggtgagactcattttagacctctgccctccagaactgtaagatacatttctgttattttaagccacgaagttcgtggtaatttgtttcagcagcaataggaaatgcagacctgaaaaacccatctctcaggtctgttgagaagatgaatatcaaatgcctaacatagtgcccagagcattgtaagtgcccaataaatggcagttttcatcactatttccttatcttggaagacaggagtagctaaattatcatgtgccattgataccaaaggcctaagggagaagaagagaatgcatagtgaaaaaggagaacattttagtggccagaaaattcagaatatcttgcccactgacatatcaccaccttccaataaccaacccacagctgggctgcctccctggcatttctgtcatgtccttgcctaggtttcttcaatttatgcttttctttttgctcagagcaagtttctaccttccttcttttctcccacttttatctgcgttttccaccctaattgtgactcctgcaattctcccatagaatattcatttgctctttcccctttgtctaaactctgtgtggcagagtcatctctggaaaagtctgtacgtcacggggcataattgggtcacccaggccacctcccttgatcggggcccctgcagttcctttctggaccaataaagcccctcagcggtgcctctgtctttctccacagccctccttgtccccttgatgtgcacggtcatttttcctttgaacccacgctgtaattgcactttaaactccttgaggccaggcgcagtggctcacgcctgtaatcccagcactttaggaggccaaggcaggaagatcacaaggtcaggagttcgagaccagcctggccaatatggtggaaccccatctctactaaaaatacaaaaaaaaaaaaaaaagccaggtgtggcggtgggcacctgtagtcccagctactagggaggctgaggcaggacaatagcttgaacctgagaggcggaggttgcagtgagccaagatcgtgccactgcactgcagcctgggcaacagagcaagactctgtctcaaaaaataataataataataaaaataaacttcttgaaagaagaaattgtcttatttcacacagtacataatcagtacgagttgatatcggtgctgaatttggcctctactgatttctgccctttcctctctatgcttctgttatctgaactcctacgtttcacagtctatttacttttgtctctagtttagatactaacccaactggtcaggaataatgtctgtacataccagtaatgaactttacaatgtgactcaaccagctacatgagtaagtttcccccttgggggagtttgtgcagtctaacacgcaacaataactggaaagaatgaatgaaatttctaagcagaaagaaatgaatggcatttctaagcagaaactacacagagacgcaatggcccagattcttccatttctccagcaaacatgaattgagtacccactgtgtgccaaattctgagctaaaagtgctcataaattttaactgaacttgtcacagctacccaggtaaacagataaaggaaaacatttagagatgtctaaacttacttggaaggttgttaatacttacagtgtaacaatgaggttaaaatttagcaaggcttgagacaaatagaaggtttgcctcccactgctaccctacaaaactaggactttgaccaaattgactggtttgctatcttgtgggcaccttgctcttctgtctctactccctaacttttcctttctctttacctggaatgtcacccacccccacctcactcccacacatatccacctctactctacatatcaaaccatacacatcctgcaagacttacgtcttcccgcctcaggactctcacaatatttcatctcactacatgtagtataattgtgtgggaatgcatcttagtttccctactaacgcaaaaaatcctagaatacaataatctcccttacatatctttgtatgcctcagaatgcatattgaaccatttaatacattttttatttacagcaggaatgcatgaattgattaattaaatgttgagagctgtagatggcttttctcaaggtgcttcaagtgcagaagcccaagtgattgacccacacacttacctttgtgttccttccagaaaatcctcagggaggtgagagacccatgttcagctgtgtatggcaccaaagtctatacatagtttctgggagtcactgtgggctgtggggaagcacgtggactctggagtcacacacaccaaggtctctagcctagctctgccacttactggttgtgtgaccccagggaacttaatttacaaatttaagctttagtttcctcatctgcaaaatggagcctcctcgcctttcttcttttgctaccgaactgggttatgagaattagatgcgtgcatgcaaagcacctggtagagtggcacacacctggcagaaggaagtaaattctagtccccgttttcacttaccctcatatacaacggggcacttttttatttgccaactatttctttgaagataataaaagagtcagaaaatgatagtttttaaaagcaccctgcagtccacatgggaaccaaccactacctctggccatgagtttaccctttgggtttccatttgtcatggccaagggcagtgagggctatgccagggaccctcagtgtgtttggccctacccaatcaccatctcaggtctaccccttgtgcattccaccttgcggggctcagtccaccactcagaaggatgcattctgcacactccttgcctgaaagaactcctgaaaggcactgaccaggctctggaaggctatattcttttcattctttataaaagttatgtgattaccaagctcaataatcaaatgtccttcatcgctaaaagattatatggctttggtttggatgctttgggaacaaggaggcaatacgcaatggcttggtttactcatgttacagaaactgtagcagttatttggtaatgctttcaacagtgccttcagcttgtgggaaatcccgaagatggccaaagacaactcaactgttcgttgcttccagggcctgctgatttttggaaatgtgattattggtgtaagtaatgattattttccaggaaattctgcacttcctgtaatcataattctagatgaatcaaaagtaagagtttaaaggaaaataatgctgtgattactggcttcctatatttttgcttcattttaagaaatgtgttagtaaatatgctagctagaatttaactgtatgtcaaaagatcatggttgaaaaagtagatattttcctcccaactttaaaatataagtatctaaaaggagtcatgtcaaccatagtcagtgtctaaacactctgactacgaacacacttcactatttcttttctatgtcaccttggtttgatttccatgggactctgctgttaaggttttttgggacagatgcttgcatcttgttcttctcatacagaggccagtaccagggtgtaagaataatacagaggccatactgtgtgggtctggtggcatagaagaacatttgttttggagtccagagctcttggcccagctctccctctgactccccatatgactctggccatcacctttcaaggctgagattcctcatctataaaatgtgggtgttggcaaagataagcagcaaggttcctctcagctgtcattgataaatatgaccaggaccagctcaaatattacaacccagaaatgtgggtcatgacatgggggcagggggagatcattctcataccagaaagcattgtttgagtgattcatgccccaaggacattgtggatggtctgaaattgtgtgggtctgttactaaatagacagaataacatgtgaagggatgtatgcaaccagttagtaggatggaagtagttgtttgatttcctggcaatggggagtttagattagttgcataaagcctgtgcaggaaagggagccagtcactcttaccttccccaccctccaccccctttcccaaagctgcactcctgatggagcccacctttcatttgcccccagtgttgcggcattgccctgactgcggagtgcatcttctttgtatctgaccaacacagcctctacccactgcttgaagccaccgacaacgatgacatctatggggctgcctggatcggcatatttgtgggcatctgcctcttctgcctgtctgttctaggcattgtaggcatcatgaagtccagcaggaaaattcttctggcggtaagacctcaaaattctctggagttgtctccctgagccaattgtaatggattctttcttcttcactgagcaatgctttggctttcagtgggggagcaggaagtaccagataaggggtgaggaggggaagactttccctgcagtgaaatggtccacatggaggcaaagatgccctccactattgcaagcccagaaggctccagtacagagaagccaaaggggagacacctgggggtgacctaatgagtattttccatattgtgcctctacagctggtgtctgcatacacccagtaggtacagctaggagctatataggccaaaggagagacacagtgagaattcattcattagatttttttctcttggcaataacttgtttaaaacattttgatattaattaggcattaatatattaggatataaaatataaaatatgcatacatttttaaaagaaagtataagctttcaaagatttttgagctcaaggttgatgattctgtatcatagcctatactccccacattatcatccaatctgcttttcagggaccccagaaaaccttgataagcaccactgtagagtgagccttcagctcacacctgcctgtgggggctttaactctgtacatcaaggagaggcttctgccccaaaccatagacagcaagaccatgccctgcctttgcagatgaaagcaaatttgcaggcagcagagctgagaaacctgtttcagacgtggacccctactgtctgccctaatacttagggcagcagtttcacactattatggaacacgcctccaatcccccacccctgaaataacccttttattcaaatgctgcaggacctcagttccccctttatagaatgagtccagcaatgtaaggtgcttgttagtttactcttccttttaactaaccactgtcctggttccaatggattacagaacatttacattctctggttccttagtgtgcgtaagttccagggcaaaagtacccacttttggtgggtggggaaaggaatacaggaaaaagggagaggagacacaggtgttcctaaagacaaattcacttgcatcccagcctcactttgggccagccatgtgcatgcctgacaaccaggagaactgagctggggaggcaaaggggctaaaggaggaaacacctcactgcatacctcctttctggagcgtctttaccaggagccagcaaagctcttggcaaggagcaaggcagcagctaacacaggaaaaaaatgttctggggcctctgaaggtgctcctgctgttgactgtagccagagctttattctgggctgagtagtgagggcaacagagggtcctgctcggagagcctcccatacccaaagaggaggacagttttccctgcctaccctgctgacactgaccacagtgccccttctcccaagagtgtgtgcaagcctggggaaggcaaagctggaactcttgcaaacagtccccatcccagattcagaggtcatttgctgttcggatattttccagccagaaatagcatcactgtcatgtggaggtatcatgtgcacacgcacccatgtgcccatgctcacgcacacacaccaccactaccacacacagcaaatgccatttcactcaactgaaccaatgtactttgagtgtgggtgcgtgtgaaagaacacccacaaatgctgtgcacttgaagcctgcctctcctctgatgagactggatgcttgttaggaaggaccctagatgttcaacattatccagttcatctttttctgaactccgtgattctaaattttcagcaaattgtaaagaaaatttctccaaaattccaaaattaaaggggatttatgaggccctatactgtatgtgatacactaagactctcttgccactcactgagcatgcacatgcatgtaaatgcacacatgtaaatgagcatgtaaatgctcacatgtgtgtgtgcacacatacacaccagttcattctcttgtacttgtttttcccagttaaaatagaaactcaggaaactggactgaggaaggtctgtattcaatggctatttgttctctggagaaaaggagagaattgagctgactagcaccaagcctcaatccaagccactggtcaatgagggtttgttgaataactacatgagtgattacatgattatatgataaatttgctgaaaaaacataattatttgggcaagtcgctctttgacgggtaaatgtaattcttttatctcatttatttcccttccagtatttcattctgatgtttatagtatatgcctttgaagtggcatcttgtatcacagcagcaacacaacaagactttgtgagtacaacctcaaaaagcaaaataatatgaattatcattattataacaaccaacatgtattaaccccttactatgtgcccaggcaatccaatatgcacagtaataatacatctatcattttacttaatcctcataaatctatgaaataggcattatcactctggtcatttgagaaaggaaaaaaaatgagacagaaaggtaaaatgacttgtctaaagtgacatagttggcaactgaaagagcaagaattctgaacccagatggcctgactcccagggcccaagtttgtaatcccctgtgggtttcaccactctgccatggccatgggccttccaatgggaggatctctgttctacctcagctaagacgtgctctcaattctacatctttctttctctcccattctctgttttcctagcctaagccaccctacagtatgtgttcccctggcctcatagtgatttcttttaagatgagagtctcttctctgcatggggacttatgccaacctcagccagctgtacttggtgcctctgagtacagttttgctccaggagagaatgttcagtgtccccaggaaaagacagagaaaaatattttcctctccttgaaaattagcgtgctatctctccctcttgtgttgcctcttcctactatagttcacacccaacctcttcctgaagcagatgctagagaggtaccaaaacaacagccctccaaacaatgatgaccagtggaaaaacaatggagtcaccaaaacctgggacaggctcatgctccaggtaagacctgtggtcttggggagatgccatttttacttactggtgggagtgggtgtcatacacatgactcagtgggaccctatattttatttcaagccatgatgattagcttacatttgttggaatgattttgtcaagaaacttaggttaatcatacactctccctcttagaactcaggtatcatttacattaaaagaaaaatattttctctaccccacagtgaactcgagtggtaattactgcctgtttcgccttttgggtacctcttcacaactcctgtgagctagtcttgccaaggaccaggccctatatcttgatttgatcacccaattttctccaactggcaatcatagtttatgtccatgtttatctccagtgccatcaaaagtccaagtcttccagaatatccatcatcacccccacattgccctctgtatgcaaattgttatcctctacataactaccaatctgacctagctttcttactggcccctgctcctactccacaccccaccaccaactttttacagtctgtcatcagcaaactcccttatagccaccactccttctatgaactctttactatctttttcttgcttcattggaaatttggctatctcctgggagtgctacctgcccttcattttcctcccatatccatgtaccataggacctggaaattggctaggtgtccttcttgctccccttggctgccatactatttgcttccttgatctacatcaccccttatccttccttgccattacttaccagcctccctaccctcagtcgttctcctgccttcattagggatttcaatatctcacttaactatctacctcttcagtcatactcctgatatcccacctagaaacttcagcagccacatggatgactcagcaacatttagtctcacaattccttgtcctaccccattccaaagattttgtctttctccccacctccaccctcttccatgaccatagtcagcatgccatcaccagtaactgtgccactaagaacattccattctctgaccattaatttctatcatttctttcatttattctaatatctcaattctaataattttattccattaggacctccaattaattgaccactttttaacttttatcacccctttcatgttttctctttcctctttgcctaacccatattcaggtccagccccatagccagtccttccctacccttctctgtgggtcactctttcctaaccaagcccaccgagtagaatatagctttttgctcactcttcgtttatactctaagagctaaacattgctgagaaaagtcacacaaccatgatcatttcaatttaaacttgtgaccacagagctcaaatgggcacacaatatttcctagtatattttcccagaaaattcacttgtcactatttcacatgttcttccttcatgcctgccacacctcttctcaccctccctctcagttgatgacccgacctcatatgtttttaagaatatagaagaaattagacaagaaccacctcatctttctaccaccaaatctacattgatatacacctgtgcactttgccttctctcttgttatgtcacacaggctgtcctttgtccagctcttttgattctgttctgcattccatctcctttgccccaacagtcttccctgctctgatctgcctcatcagtttctccctttcaacagcctacatggacaccttaaattgtctatcttataaaaagactcccttgtccaacattcacccactattctgtcctactactgttttgttttattccacagcaaatctcagaagagatgcctacacttgtggtcccattttcatccctctcatctgctttcatccaactacaattggcctctgcctcaccactcaacaaaaacaaccctgccataattaccaattacctccatcctgccaaatccaatagccaagtctctgtcctcatcttctttgacatcttatcagcatttgtctcactgactactcccgcttagtctcctctgctgggttgtcactctttacccaaatctgaagcttggagtgctacaaagctcaattttggacccttaaatcttctctgtgcccactaaatcctagtttgaaataagcctggcttagacttaaccatttttcccagaatgcagaataattatttttcttggttagatatttcccataacatagtgacaaaattgtatatcctttaaagatggttgatttatcatcaagtttacttgaatacattcattctaaaagttccaagatacccatggttttaacttcctcccttttgaaggattttaggagaattgataacaaagaaggaaagctatatgaattgtgttttgtcctctattctcaattctatccagagtgtaagggatgtattaattggtctccctcccctatgtggagacatagctctgtgtcaccaggttatttttttcactttattttctcccattataaaaataatacctaattactctaaaaaatgtttaaatgtatagaaaagcaaaacaagaacaattactcataacttcaccactaaaatttttaattttatgattctcaatttgctttgatataatctttaattttatgattctcaatttgctctgatatatcagaataattattcctctctcacattgttatatcaatatattagtacagtatcaatcataattaacatttattaagagtttaccataagccaggcactgtattgagcacattaagtatattaactcatttaatccttaaaaaaactctatgagataggtactatattccaattttacagttaaggaaactgaggcttagacagtttaagtaacatgtcaatggctacagggttcactaatgactagtaaagtaggaagtgtaaaaattcttttacaaactgtaaaatgtaagttgtaagttatcaataccttcagctgtcatttggggatttcttagtaaatgtaagatatggtacactttccgtatcttctttctctataaaatttcagttgctacattgatggctctagtagggaccacgaaagagaattttgtatctctcatctgctgacaggacaattgctgtggcgtaaatggtccatcagactggcaaaaatacacatctgccttccggactgagaataatgatgctgactatccctggcctcgtcaatgctgtgttatgaacaatcttaaagaacctctcaacctggaggcttgtaaactaggcgtgcctggtttttatcacaatcaggtgagtcctctctcctcccaagacttcccaggaggttctgctgctctttatgagaaaaatattggtcaactgtaggaaatagtctttcagtaaggaattctacattcttttccctaaacctcatgttaactatttccttctctgttaataaactgcaaatgctaaaccaggactgataggggcaaatttacattttaataaaattaacaaaacatgagaattgcaatagcagaacccaactttgtttaaatgaagacaatttgcacaatgtatggaattggtatgtcaagaaatatttacattaaacaaagttttgctctagttttgcaaaatgtaaattggaagggatgatgtgcaaaaagaatgttttgccaattccaaagcaatgactattgctgaggataaatgtagtaattacacatccacattccttattcaatggtaaagtaggacagtcttaataaacattaggttggtgatttggatggaaggtagtttacatacagatagtttttgaaaaagtttccaggctgatgaggataatgtgattacgatcatgaaaactaacatttattgtgtacttactaaatgccaaacactgtttccagtgccacacatacactatctcctttaatgctcagtagtaggtgccagtaggatccctgttttacaaacgaagaacttagacgtagagatactaataaataccttgctgaggtcacacaactagtaaatgtccgtcttttcaaaaaactctctggcttttgaaacatgagttttctgccttcaagcacagactctaagccagtgaagacttgttaatattccccaaaagccctgatgagaacctccaggtacttgtagtcagcatctgctgaccctgtacactgaaacgctgtgctctgctcagggagttacctctttaaggaaagctagttgtgtaccagctcattaaataattgagaaatgtcaggctgttttgtttgggagcagtacaaactgcatgttcagattgagggacatggcactgttgctgacagggtgcctggactagaactggatgcattattccagaaaagggcatgggagtgttctagattattttgcagcagtgtccagagcaaccctcattgagctttactgcaacattgtctggcattgttttaatcaattatattcagactgttattaaaaattaaatttgctgcttataatcaaggtgtacaatataattattctcaggactataaaaggcttttgatatttcaacactggaactgctcatgcaaacaaatcttgattggattgtaattgtgtacaaactgtattacctctttgaaagggataaaaataggacatttgtcttcagataaccagtttatttcatagttataccttttttcctagcacatataatattttagttatgaggacaaacctgaagcttttctcaagtttagatagatgagaaattgaggaaaagatacaaatgaactattttcctctaccttgggacctccacacccattttgacaatgcttctaacacgttcccttacagttccctggcctcatctgttctaacaattccacctccactaccctacagttccctggctttatctgttctaacaactccacctccactacctaccaactacaaattcatcatcactcagccctactcctccaccaaattcctgaattctgaaattcctctctctgttcctgacttcctgtgctccttgtttctcaacctcactcattctgctcctttgacataatctcttatctattagtcctttctgattctccctagcccagcctcccagattcccacacaccaccattctccctgactcataggtcttgctaagtcccctcttgccatccttttccaccaagaaaaaggtgctaccccaagacctggtatactttatttctattattgcattcactacctggaactatatttgttcccaagtctattttttctgagtctccttgaggactatgtattatttgattctacagatttgatatttttagtacttagcataatgcctggcacaaagcaagcaccgacgtttgatagatgggtgaataaagaagtgaatagtgaatggtttttctttttctttttttttttttttttttgagatggagcctgtctcactctgtcgccaggctggagtgcagtggcgctatctcggctcactgcaacctccacctcccaggttcaagtgattctcctgcctcagcctcccaagtagctgggactacaggtgcacgcaaccacacccagctaatttttgtatttttagtagagatggggtttcaccatgttggccaggatggtctcgatctcttgaccttgtgatccacccacctcagcctcccaaagtgctgggattaaaggagtgagccaccgtgcccagcctggtttttgttttgttttgtttgagagacagggtctcactctgtcacccaagctggagtgccatgctgcaatcacagcttattgcagcctcaagctcctgggctcgagtgatcctcctttccacctcagcctcccaactaactacaggcatgtaccaccaggcctggctaattttattttttgtagagatgaggtctcactgtgttgcccaggcttcactttttgacaaccatattgtaggttttcaggatctacaatgcacaaatgtgctgctatagctgtgaagactaacaaaattagggaagtcactataagcttgttaatagtagaaattaactagaatttcacacagcatgtcagatgcaaatatatatatattctatgttatggtttatgtgactcagaaatgctatgtgcaaattgtgatcactatacctcaaaaatgttataataaaatgaaggaagatcaagtaaagtaccactaaattgactagcatcacgaaaaggcactaaatgatggtgaaaaaaatggggcttctgtctgtgagcttcatgaaggcaaggcccatttctgtttgccacagctaaatgcccagccagtacttggcacctggcataagtgggcccttatatatatattattagatgaacgaccacctcccaggattgttgggaggaccaaggagtagcagatatgggagtgttttgtgaaccatcaagtgtgttgcaaattatactattgtaaacattaatgttccattcattctgtaaatgtttattacgtgtctactatgtgccaagcacttgttctaggttctagaaattcaacagtgaacaacataaaatccctgccctcatggagcttgcattctagcatgggagacagaaaataaacatgttaccaaacaaatacatgataaaattccaggcccaaataggccatgagcagaaataaggcagggtgagtatatagagtaggatggagaaagggtctttttctctgtcactgtcaggaaaggctttgttgagatgatatttgcagaggtttgaattaagtgagaaaatgagacaccggaagattggggaggaaagttctacaagaaaggagttgtgagtgcaaaggcccttaagtgggagcaggcccagctttttgaaggagcataaaggagatcagtatgacaaagtcagaatgagtgaaggatgagtagatgacaaggatggagctagattttttgtggctggagtcccccacccccaccctcacacacaaattatagggaaggatccttcttaggaaaaacaataaaaatatgcatacaaaattaggcacagggccttgaaagggtcttgcaagtaaggggccctgaagcttaagctcattcgctttatagagaaacctcctctggtagtggaagatggggtgagaggcagagccgcatggtccatggaaccagccctggttattgcatttcctaggcattccctttggttcccagagctttggtagaggctgctcagatggcagctctagccttacatgcgtgtatcactccagaactttgcacagtgactaggatagagtgcgccatgtataaatacttactggattgtggcatgcatgaatggatgatttggtgaataaaaaaattattcctttgcatgctcactgtgacccttcaaggtctcactagaatccagtaaagatatgttgaaatataacatcaaatgagaattcagggagcataatgcaggagttcctttaatgattattaaaaatggcaacaggggacctctggttttcatggacagaagcatttttattcaaaaacaaacaaatcaaaaagtaactgcctccaaataaatcaccaacgaagcctttggggagggaaaaattctaattgaattaagatttttgaatttattgtccacatattcagtatagaaagagggttatgctaaaatagcagtactttttagtgagattaagtgataaagacacaaataaatgtgttgtggaatcattgttcaacagtattgtttatgttcccttagtaaagcactattagtagctggctgtcctcagagatgtggaaatagcctggatatgtgaaatcagaattttgagtagcattgattccaataggaacctgctttcccatcaatctcttctctgctttctggttcttctcacactaatgtggaattgcccactccttcagggctgctatgaactgatctctggtccaatgaaccgacacgcctggggggttgcctggtttggatttgccattctctgctggactgtgagtatttcccagcacatattttatctgagaggatgatcatacggagagaccttgagagtgccactggttacctcaaccacactagaaagtctagaaacaaaacctcaggcctgaaggctagtcaggaaacttctggcaccggaagaaggacagtgggttctcttgagaggcaaggagttaacttcccctaccagggaaaggctgtgccctgccaaccagctccttcttccggctgatgggcagctgcctttagagggctggagagcctctttcccttgccagagttcttagtgaactgctcctcctggtctccagatctcattaattcatttcatccacatatcaaagactgtcacctatctagatggcccctgcctgatactaatatgcccagatccttctaaagagctgcctctggcagattcatcctttcctactgcccactttatctgacgcatatgcagcaagaggttggagcggtggttctcagccctggctacacattaaaacgccatggggaaactttttttaaaaattgcttggatcccaacctctgagacttcgatttagttgacctgggggttgagccaaggcacttttatttcccccagatgatctgctgtcagggttgacaaccattgccttagagaagcagtcacaaacttttgatttcagaacccctttacactctcaaaaattattgaggactccagaaagcttttctctatgtggcctatatctattggcatttaccccattggaaattaacatagaaaaatttaaaatatttattttaaaataataagcccattaaaagttatcacaacacatttttgtggaaaaacaactattttataatagtgacttttttgcaaatctcttcaatgactagctaaatagaagacagttagattctcatatttgcaccttcattcaatctgttgtaatatgttgcctaggttgaatgatctggagaaaatgcatccttcatatagacatgtaattaaaaaaatagtgctttaataatattcacccagtagctgggaccacaggtgcacaccattgtgcctggctaatttttttatttcttgtagagacaggatcttactttgttgcctaggttggtcttgaactcctggcctcaagcaatcctcccaccctggcctcccaaaacactgggattatggccatgagcactgcacccagcccacaagtagtagcttcttaaagatcagttgcaatttggaatctgaaattctgttaatgagcttttcatactctgttatgttaaaatatattacattggtttgtcttgcactttgcatatatctttcagccatttataattctataacatcatagattgcttatttggaaaaaatattagttcattgtgttatgcagatcttccaaatgttaactgatttatgtatgcaatatccagaaaatcacatgtggcattgatattgccacatggaaaataccttaagcaatggaatgctatcaagttcacggtgacaactacaagttttccaaggttctgatttttgcttgaaagttcaaatttatcattggcaatgaatattgtcagttgttttccttgaagtgacagactcactttgtaaattttcaagaaaatatctgccacatgtccaagtccaaacaaccatagcgtgtctgttcatcattttttaaagtaaaagtggtgtttccttttaatcatgcaagtgcttttaagacaaccatattacactatgcaacagactgttttatgaatgaatacttcctttctgtcatgcagaatatttaaaaagatgtgtactcaaaggccaaaatgtaataaaattagtagttcttactgcttcattgaggacaatctcaagtgaaactggctttttaaattttttttttttactgcaagtgcgtagcagtgaagacacaatgatcactaacaaagtttagtgactctgccttgattcttgctaatactccaggagttttacttcccactgcatttacaccatcagtgcaaatatgaaaacagtgaaaaaggcaaataaattctcattgttattcagatagccttacataatggacttctgaactgtccctcaggtgtttactatgtgtattagtccattttcatagtgctatgaagaaatacccaaaactgcataatttataaagcaaaagaggtttaatagacttacagttccacatggctggggaggactcacaatcatggcagaaggcgaagtaggagcaaaggcatgtcttacatgacggcaggcaacacagcgtgtgcaggggaactgccctttataaagccatcagatctcatgagacttattccctatcacgagaacggcacagaaaaaaacccggtcgcatgattcaattatttcccatcgagtccctcccatgacatgtggggattataggagctacaattcaagatgagatttgagtggggacacagctaaaccatatcactatgctttaagaaatgctagcttagggggtgataaactgagtgaggcaggaaggagagggaaatcaactccttcaaggggtcttttatgatccctcaacccaacctgttaggagctctcacaacatcctgagcacacctctatgatggaacttctccatgatgatgtatttgactgcaaaaagctgagaactagctgttctttgtacccccagtgccaagcatagcatgtagtaagggctcaagcatttgttgaatgaatgaaaggtaacagtgaagtttctatttgtgccatattagcaggaactgtgggataatgtttaaaggctttgagtatcttagaactccaaaccagttgtaacccttgattttccacaagtatcaaataaactctagatctagttaattccctcttgaaattcaaaagagggaagggaagggaagggaattaaatgattaaatgtattgagggcctgctataaacaaggtaccatgtcaaatatttttaatattaaatccccacaacagtagctaagcaggtagccagtgtcctgtcttacaaggagcagagaaattcagtggggctctcaagaattgtgcttaataagagctcttaagcatgcccatttcactgttgcttgcaaggggctttttcttagtgattaactagataagctctgaagctgactgcttgggtttgaatcccacctccaccacctactagttctatgaccttgggtaagttacttctctgtgcctccgtttctccatagggttttggaagcattaacttcagttatatgggtaacacttagaatagtgagtgatgcataataaggtattctaataaacattagaccctgttattatttcattatctcattcactgctctagcttggggtaggtagagatgttatatttattttataaatgtagaaactgaagctcaggaaatttaagtgacttggctaaagttacccaggagtaagtaccagatctaaaacagagcccaaataaactaaaataaaactcagcccttgcctaagtcagatatcttgagttctgtggcattcttcagaggcagccattccagggcacaagcattttaggaaaaaatagaagttccctgggagaagtttaatactagaagcaaggaatgcttaccccgaaatggtacatactagaaacaggaaggcattggaggataagtggccttgatggcaaaaagagtttagcacagacgagaagggcaaccccagaagacaaggaatctaggatgagaactgggatcagaacgtggggaacacagaagttgcttctgagtggcaggtaataagtgatgctttggagcaggatggatttggtgtcacatctggcccagtgatgttgcttataacgagattactcttaaaaatctgatatctaggccaggcgtggtggctcacgcctgtaatcccagcactttgggaggccgagacgggcaaatcacgaggtcaggagatcgagaccatcctggctaacacggtgaaaccccgtctctactaaaaatacaaaaattagccgggcatggtggcgcgtgcctgtagtcccagctacacaggaggctgaggcaggagaatggcgtgaacccgggaggcggagcttgcagtgagtcaagatcgcgccactgcactccagcctgggcgacagagcgaaactccgtctcaaaaaaaaaaaaaaaaaaaaaaaaaaaatctgatatctaacaaagacatggaaccaacccaaatgcccatcagcaatagactggataaagaaaatgtggtccatgcacactatggaatactatgcagccataaaaaggaatgagatcatgtttttgcagggacatggatgaagctggaagtcatcatcctcagcaaactaacacaggaacaggaagccagacactgcatgttccctctcataagtgggagttgaacaatgagaacacatggacaaagggaggggaacaacacacaccagggcctgctgaggggtgaggagtgaggagaagggaacttagaggatgggtcaacaggtgcagcaaaccaccatggcacacgtacatctgtgtaacaaacctgcacgttctgtacatgtatcctgtttttgttttggttttttagaagaaataaaaacaaacaaacaaaaaaatctgttgtcacctaagcctgaatgaacctaacatccactttttccaagaatgagatgtttctaaaacaatcccttgtttatttttccttgtttttttctattccagttttgggttctcctgggtaccatgttctactggagcagaattgaatattaagcataaagtgttgccaccatacctccttccccgagtgactctggatttggtgctggaaccagctctctcctaatattccacgtttgtgccccacactaacgtgtgtgtcttacattgccaagtcagatggtacggacttcctttaggatctcaggcttctgcagttctcatgactcctacttttcatcctagtctagcattctgcaacatttatatagactgttgaaaggagaatttgaaaaatgcataataactacttccatccctgcttatttttaatttgggaaaataaatacattcgaaggaacctgtgttatcacagtaacccagagctgtatttggctagcaatctgcctgtatctctcactattatctaaaagaaaccttccaatgcttctgttgatctcagtattgtcaggggaacagagaagttgggaaaagattactgaaatataccttttgcatttctttctagagtagctcccatatatggagatgggtgattctcttgatgccaccttcagatccttttattctccagaataattcttaacagtggttcaaatttcctttcataccttgaagtatgtgtttagtagcctcaattctccattaattaaaagtgtgggctgggcgtgggggctcatgcctgtaatcccagcactttgggaggccgaggtgggcagatcacctgaggtcaggagttcaagaccagcctggccaacatggtgaaaccccgtctctacaaaaatacaaaaattagccaggcgtgatggcaggtgcctgtaatcctagctacttggcaggctaacgcaggagaatcacttgaccgggagacagaggttgcagtgagctgagatcgtacctattgcactccatcctggatgaaagagccagactctgtctcaaaacaaacaaaaaagcgtggggacttctggggacagacaaggtgcctgttatatatttactcagtctttgccctgaatggtctcagcttgagaccatttcaaactggagagaagcaagccagccaatagaatggggtgatttacagggatttctgtttactgtcaaaatatttctcatctgcactatgtttccatttgtggtcctgaaggaaattcttataactcaacatttgtctggtcttataagtaaagacagctttaaaatctgttcactttca

SEQ ID NO: 6 - DNA, 2262 bp, Homo sapiens
  DNA (1)..(2262): Uroplakine 2 (UPK2)
acttgcctcaggaaccccagcctgccagcacctattccacctcccagcccagcatggcacccctgctgcccatccggaccttgcccttgatcctgattctgctggctctgctgtccccaggggctgcaggtctcttccatctctggcaggggtgggaagggggctgggggcctggacagggagcactgtaccttccagggctctcaaagagaggtctggacagttgggagtcagggctggtgatggcagtgactgggtatcagacactgggctcagggtacactcctgatcctcctccagacctaggaggcagagaggtgtgggcaaggatccgatgctgcggggaggggtgaggttgggcgctgcccgactcctggcatccaggttctggctctggggaccgcttggtggagggtgcagcttctgcagcccaagcctgccacctggtggtcatactggcacaggcctggctgttctgcccagggttcacagagtggaaagggagatggctccaatgggaccgggccagatctgttggccaggaggggtcagtccccatcggagctccctcctgcctcccatcagacttcaacatctcaagcctctctggtctgctgtccccggcgctaacggagagcctgctggttgccttgcccccctgtcacctcacaggaggcaatgccacactgatggtccggagagccaatgacagcaaaggtctgctaccttctcccaaggcatccctctagtccccaaagaccccttcctgcgacaccctctgcacccttttccccattcatgccttcctgtccacccgtctcctggggtacccacactctaaaagctgccccttctccttggggcctccagaaacttgacccagtcttcccctcccgccacttctgcccagtggtgacgtccagctttgtggtgcctccgtgccgtgggcgcagggaactggtgagtgtggtggacagtggtgctggcttcacagtcactcggctcagtgcataccaggtgacaaacctcgtgccaggaaccaaattctagtaggtactgggtccagcctgaggcacctagggaagggggtgcaggaagagagagaagctagtgtgggggagatctggtgggcatgaggagagggtgagggcacagcaaaagggggtgaaagctgggcctcttggaggagtgcacataggggagacacagctgtgagggtaggtggcccaggctggagcccctcttcctgtaagtcccaatactcactgagggttctctactctctcccaaaccacaaaagcatttcctacctagtgaagaaggggacagccactgagtccagcagagagatcccaatgtccacactccctcgtaagtaacactcccgcctccctttcccatctcagcggccacaaacgcttccctgaccattcctgcctcatccccagtctgggttgcctgtgcctccccgtgcgccctcggggcccctgcttacctctatcctagcacggaaccttcggcatggctactgcacactcagctaaaggttcctcgtgggcagggactgtgtcctcttaacttttcctcagcggctgacataggagatgcttcataaatgtctatgtgatgggtgtttggatccatcagctggttggttggttggttggttggctggctggctggctggctggctggctggttggttgggcagtctgttggctggatgagtgtgaggccgtgagcctcaggcaggctgggggtctctcccgcccacagtggtctcccctctcttttgacaggaaggaacatggaatccattgggctgggtatggcccgcacagggggcatggtggtcatcacggtgctgctctctgtcgccatgttcctgctggtgctgggcttcatcattgccctggcactgggctcccgcaagtaaggaggtctgcccggagcagcagcttctccaggaagcccagggcaccatccagctccccagcccacctgctcccaggccccaggcctgtggctcccttggtgccctcgcctcctcctcctgccctcctctcccctagagccctctcctccctctgtccctctccttgcccccagtgcctcaccttccaacactccattattcctctcaccccactcctgtcagagttgactttcctcccattttaccactttaaacacccccataacaattcccccatccttcagtgaactaagtccctataataaaggctgaggctgcatctgcca

SEQ ID NO: 7 - DNA, 10888 bp, Homo sapiens
  DNA (1)..(10888): Uroplakine 3A (UPK3A)
ccgcgctctggcggctcctcccgggcgatgcctccgctctgggccctgctggccctcggctgcctgcggttcggctcgggtaggcggtgaagggcaggagggggctgagcccagaaagagcgggcagctctgccctggggcgcccgccgcctggaccctgattcctggcgctggggacccagatattactgttatgaataatagtgatagccaacgtttacgggcctcctctgttgggaatccgagggctcacagatggctgcagccctgcgatgtgtgttgcaagagaccaacatgcaggggggctgcggtaggacagagaagggactagccccagccccatggtgacgcctggacgggggcagatagagagatatttcggccgaggaagcagcatgggcaagttcatggaggggagacaatattgggctgtcctgggaactgccagtccatgggaccagctggagcctggggtgaggggagcctgtgggggaaggggtgaggctggagaccgaacaaagcaaagcccagaacttcaggacctcactgcctttccagagaggctggacttcgtcagggggcgctgggggaccatgggagggccatagccagagaatgaggcagtcagacttgcatgtggggggagggcccaggtgaggaaggtgggacggaggagggctgggccgatggcatggagagatgcttaggaggggcagtggagttcttggcaactgagtgtctgcagcagggagagaaggcagcagtttggcccgaccgctccatttctgagcaggatgactgggcagggggcagtgtctgagacagcttatgcggtggcccagggggagggtgaagcccagggcctggcacacaacacgtgctcagtaactgcaagcagagtgggtgtggacagttctgccggaggtcagttcccatcctcactgcctcctccagctgtgaacctgcagccccaactggccagtgtgactttcgccaccaacaaccccacacttaccactgtggccttggaaaagcctctctgcatgtttgacagcaaagaggccctcactggcacccacgaggtctacctgtatgtcctggtcgactcaggtaagggtcctgcttccctctggctactccaaaaggggctctgacctgtctgcagggaggagggaaggaggcagatagaggaaccctccatgcctgtagtcgtctcattaaacaggtactgcagccacagacctgtccttgccttgcagggacatccagttagtgagggaagtaataacaccaccagtcactgaacacctacaccataccaggcactttgcacaccatagagctagtatctacaaccagcttgtaaggtagctattaccaatccccattacagagcagggaagcaaggctcagagaggtggaataaccccccctggacctcccagggctggagagtgaatcctgatctctctagtccccaagcccaaggtccttcctgaggcttcgaaaggtggctcaagattggtgtttctgagacaaaaccatgcatttggacctgctgctgtggcccagccccaacccctgccctggaggggatcctgagcttctgagacaagccaacatcaactcttgcatttctagcagccagtcatttacaacagctcattcgggaccatccttttcttctttcagcatgtgtttattgactataaactaaagtgcctgatctccgggcactgtagggaatttctctcccatttcatagaagactagggtctgaagaggtagagtgagttgtccaaggtcacccatctagtaaggaggagagctgggtcctgcctccacgttatttcccttggaccgatgaccttcctttcccattttacacaagagagaatccagggctttcagcaatgaagagacaaaggtctgttgggatggggggttgcaggaatgtcacaagataaggcgagagtcagacacagcgcccaaagcagggaggtgatccttgtccatctcccacattgcactgagagggcagagactaagtttgccccatgcctgtgatgccagtgcccagcacagagctggggcagaaaggatgatcaggcatttgatgaataactgagtgagtgtcgctgagccggagtggccagaagcctgactccctgcaccgcctctgcagccatttccaggaatgcctcagtgcaagacagcaccaacaccccactgggctcaacgttcctacaaacagagggtgggaggacaggtccctacaaagctgtggcctttgacctgatcccctgcagtgacctgcccagcctggatgccattggggatgtgtccaaggcctcacagatcctgaatgcctacctggtcagggtgggtgccaacgggacctgcctgtgggatcccaacttccagggcctctgtaacgcacccctgtcggcagccacggagtacaggtgggtgtaaacaaaccactacaggagagccgcggcagttccccagtcctgatgagggagagcaggggcaaagtaggagcagccacacttcttgagaacttatatgctgagaacatcccaggttccaggcaggccacgctgagcctcaagttcagaagaggcccctcttggattgacgctctgcaactaccgtcttgaaattctgtattttatttatttatttattttttgagacggggtctccaccatttcccaggctggagtacagtgacacaatctcagctcactgcaacctccgcctcccaggttcaagcgattctcttgcctcagcctcccgagtagctgagattacaggtgcacaccaccatgcccggctaattttttgtgtttttagtacagatggggtttcatcatgttggtcaagctggtctcgaactcctgacctccagtgatcagcctgctttggcctcctccatagtattgggttacgggcgtgagctgccatgcctggcccatcttgaaattcttaattgttgaacaagggcccacattttcattttgctctggggcccacagattatgcagctggtcctggcccatctacgtgtgtggaagtcacccacccaaaccccttcgtcttacaggaaaggaaactgtgccagagagggaaggtcacccagtggaaagctggggcccagcatgaacagaaaccctaccaaagccttgccatctgcagcctcaacttctgcttttttttttttgagatggagtttcgctcttgttgcccaaggtggagtgcagtggtgcaatctcggctcaccacaacctctgcctcccgggttcaagcgattctcctgcctcagcctcctgagtagctgggactacaggcgcccccaccacgcctggctacttttgtttttgtatttttagtagagacggggtttcactgtgtcagccagaatggtctcgatctcctgacctcatgatccgcccgcctcagcctcccaaagtgctgggattacaggcgtcaggcactgcgcccggcccatttttgtatttttagtagagacagggttttgccatgttggccaggctggtctcgagcccctgacctcaggtgatctgcccgcctcagcctcccaaactgttgggattacaggcgtgagccaccatgcccagcttcagcctttttctttttcagttttctttgtgatgccaaggagcaggcttggagtcacggaaggcagaaatgcaaggaagacagatgcattagtgctcagcaactatgccacgtgtgttacatggaggaaagaaatggaggggagctctaagagggagcgcctagaagggcagcttctgattctgaaggcttcatggatgcaggaggtggcagctgatccagggaggggtcctggggggggtcctattggccaagctcagcactgtcctgttgcccagagcccgctcagtagccgtctacatttccgtctcctggaagggcccccgctgccgtctcccacccctaggccatcctacatccccccaccgcctccctgtgggtggggctcacaggaagcataaaagtcaccctggctccgtctccttccaggttcaagtatgtcctggtcaatatgtccacgggcttggtagaggaccagaccctgtggtcagaccccatccgcaccaaccagcgtaagtggtgggcagtggtggtggtgatgctcaaggggacccgagaaggcggggccagccacggcggtgagaaccaaggctcctctgtccctgtgaaagcctcccaggccaggcagtgatgagtaaaatgctccttaaagctgttgagccaggccaggtgtggtggctcacatctgtaatcccagcctttgggaggctgaggcaggtggatcacgaggtcaggagatcgagaccatcctggctcacacggtgaaaccccgtctctcctaaaaatacaaaaacaaaagtagccaggcgtggtgggggtgcctttagtcccagctactcgggaggctaaggcgggagaatagcgtgaacccgggaggtggagcttgcagtgagccaagatgacaccactgcattccagcctgggcgacagagtgagactccgtctcaaaaaaaaaaaaaaaagaaaaaaaaaattagctgggcgtggtggcacgtgcctgtaatcccagctacttgggaggctgagggaggagaatcgcttgaactggggagtcagaggttgcagtgagccgagatcacgccacagcactccagcctggtgacagagtgagactctgtctcaaaaaaaaaaaaaaagtcgttgaacctggaacttcctccttcctcctttccatccttgagggccaggtgtgggaacagatcaaggtgcaggccttggtggcatttgggctggggatgggtgtaagcggatcaaagccggcccattcctccgtctctccagcccttacagtgggttggcctcaaaggcacgcggagctgacccggcatttacgtcctaaccagcccctttgctaaatcctcatagcagcaagcaccctatggccaggtaagatgtttccaaggcctaaaaccaagatggcaaaggcagcaaggaaccgctctccttccctgcacacctactccttagcacctgggcggctttcctgaggtggaacgccagggtgctgcgctgttccttgctcagcagagacccaaagttcatatacagagtcgagtctgctgaatgacaggggccacgccagggtctttgatggtaattttgggcaaatgatatcctaacttaagacctcctcccgccacaccttggcccccaagacgaggctgtctggcaggatgagtgtcagggtcctgtgcatttcacctgcagagcctcctgttgagcccatgtgcacccccaggggcgtggggggctctgaaaggttgcctgaagtcacacgcgagtgggtggtagaaagccttgtgtgtgagtatgtgagtgcccgtgcctgttgtggtatgtctatgtgtgtgtgtttgtgttgcgtgtggcgtgtggtaactgtataatgtagtttacggtgttgcgtatgtgtgtgagtggtgtgtgagtgtgagaatgtgtgtggtatgtggtgtgtggagagtatgtgaggagtgtggtgtggatgagtgtgacagtgtgtggtgtatatcaggggtccccaacccctgggccatggaccagtaccagtccatggcctgttaggaacgggaccgcgcagcaggaggtgagcagtgggcgagtgaaacttcatctgcatttgcagccgctccctgtagctcgcattactgcctgagctccgcctcctgtcagatcagcagtggcattagagtgtcacgggagcgcgaaccctgttgtgaactgcgcatgccagggattaggttgcatgctcctcacgagaatctcatgcccgatgatgtgtcactgtctcccatcaccccagatgggaccgtctacttgcaggaaaacaagctcagggctcccactgattctacatgatgatgagttgtacaatcattttattatatatggcaaagtaataatatagaaataaggtgcacaataactgcatataaggtgcttgaatcatcccgaaaccacccccagcccactcccgtctgcagaaaacctgtcttccacaaaaccgatccctggtgccaaaaaggctggggactgctggtatatgtggtgtgtggtggggttgtgtgtgtgaatatgagggtgtgtgtggttagtgtgagagtatgtgtggtgtgtgagtgtgagagtgtgtgtggtgtgggtggtgtatgtggtgtgtggtgggggtgtgtgtgaatgagggtgtgtgtggtgtgtgtggttagcgtgagagtatgtctggtgtgtgtgagagtggtgtgggtggtgtatgtgtgtgtggtgtgtgggtggtgtgagagtgtgtattgtatgtgtgtggtgtgtgtggtgtgagagtgtggcaggtgtgtgtgtgagtttgagttgtgtgatgtgtgtggtgtgtgagtgtgagagtgtgtgtgtgagttggaatgtgtgttgtgtggtgtgttagagtgtggcagtgtgtgtgcgtgtgtaagagtttgagttggtgtgtggtgtctgagtgtgactgtgtgtgtgtgggagttggtatgtgtagtgtgtggtgtgtgagagtgtggcagtgtgtgtgagttggtatgtgtggtgtctggtgtgtgagagtggcagtgtgtgtgagttggtatgcgtggtgtgtgtaactgtgtgtgtgtgagttggtatgcgtggtgtgtggtgtgtgagagtgtggcaatgtgtgtgtgtgtaagagtttgagttggtgtgtggtgtctgagtgtgactgtgtatgtgagttggtatgtgtggtgtgtgagagtgtggcagggcgtgtgagttggtatgtgtggtgtgtggtgtgtgagagtgtggcagtgtgtgtcagttggtatgtgtggtgtgtggtgtgtgagaatggcagtgtgtgtggctggggtggctcctcccatcctcactccctaccgcccctcccgtggcattcccacgcagtgtggtttcaccgaaacagccttggaacccttgggactaagagtcctgagcccaagccccgcctctgcccctcactgcggtgtgagccgttatggacctcggtttcctcatctgagaagagggaagaagaattcttgatgggcctctgcagcagggttcctttggggaacccaggcagaagcacaaggcccagtttttttgggggaggaccgtggggcccatctgggggacagcatgcacctcaggaccaggctggcccagcttgagcctggattctgcatgtccttggctggggactcaggctccctgagcgcagtgagtgatctgcagaatggggtctccaggggacctacctggaacagtagctgcaagtggctggctgcagtaggacctatacatcatctgttcacagcgttccaaagggtgaggccatccccagaagagtgacagccaccgtccacctggccccgtcagaccagggccctttgcctcatctttacttgtaatccatatctcagccatctcaccagaagacttgagtcagtttatgatttaaaattatgcaaagccggggcactctggtggtggctcacacctataatcccaacacattgggaggctgaggtgggaggattgcttgagcccaagagctcaagaccagactgggcaacatggtgaaaccccatctctacaaaaaaaagtacaacaaattagctgggcatggtggcgtgcacctgtagtcccggctgcttgggaggctggggtgggaggatggcttgagcctgggagtttgaggctgcagtgagccaggatggcgccactgcactcatggctgggtgacagagcaagactctgtctcaaaaacaataacgtaaaataatgcaaaaaaaaaaaaagagaagaaagagttaaaagaggaagtggccagaaacacacaaaagaaagttggaaagtggaatgtgggggaaaataaggtaattgtgcctaaaacctgagagaagtcgccccactgggtcccagggtcatccctggatccccggcagccagggcgggggagacacccgccgcctcctgggagaagggtgagggtggtgcggtgtctgggaagtaaccgggctgcatcccaccacagtcaccccatactcgacgatcgacacgtggccaggccggcggagcggaggcatgatcgtcatcacttccatcctgggctccctgcccttctttctacttgtgggttttgctggcgccattgccctcagcctcgtgtaagtacctgcctgctgggagggctggaccccagggacatgccagacacatttggctcacagggactcagcagtggggtcctccgaggcaggggacagcccggaaggcaaggaagctaccctctgccccgcgggtggggtctggtgaagagggagcagagtcctgggatttcaaagcgggaggatcatcaaagtcaagttgctcagctgggaagggtgggactcagcacctgggcttgtgggcagacagccgattcagatcttagctctgacactgaagagttatgcaaccttaggtatggcttgctatccttctgttcttcagtttccccatctggaaaatggaaataataaatattagtcatctcacggagttgtgaaggttaagtggaataatctctatagagtctctagagcagtgcctgggaactcaacaagcatttgctttcgttgtcattataatacacctacttgcagtacagagggggaaactgaggcccagagggggtcagagtggcccaaggcgacacaacctgggaccagaacccagagttgggggcctagaacctgggactcgggactccactgacacctctgatttgtgtcgcctttggatgaggacttgaggtctcccgaggggtgtaccaggtttagcagggctgtgggtgggaaagacaggtgaacccacagtccactagcccctgggaagaccaggcaggggacaaaccaaggtgccgtgggaatccagaggagggccgggggggtgctgcctggagcatcagggtggccttcctggaggaagggtcagtgtgagcaaactctcatcagcagagtgttcctcagtgagaggcagggaggcagggaggcccaggggactttgaagactgagagaggtcccagtgtgggtaagggtggagcagataggaaagtttcttggagtaggtatagttaagtggatccatggaaagcagccaggcaggaaaagataggtggggcgggtggagatcgagtgaggaaggaggctgagaacttgtgaatcaggttggtgggctgtgggctcacctgtcttccgcacccccatccctgctaaccctggtacaccccccccgggagacctcgagtcctcatccaaagctgacacaaatcagaggtgtcagtggagtcccgagtcccgggttgtaggcccccaactctgggttctggtcccaggctgtgtcacctttaccatttaatgacaaatgactctgacatttaagtgaacaaaaacaaaatagatgatatcagcctcccagaaactctgcctggctgcacccgggagcagtcagaacacagcaatgtccctccttccttttggacagtgccctaatctggcactgaagaccctgctatctgaaattagccccagtttttccatgtatccctcttgctatccccactttgttccggctccagctgcactaaactgcgatctgtaccatcgctccagatactcctcagcccttcctgcctcacacccaccatgtgctgactgaccccacacttggatgcctttctcttcccctacgctcctttttttttttttttttgagacggagttttgctcttgttgcccagccatctcggctcactgcaacctccgcctcccaggttcaagcgatactcctgcctcagcctcctgagtagctgggattacaggcgaccatcaccatgcccagctaatttttttgtatttttagtagagacaagatttcaccatgttggccaggctggtctcgaactcctcacctcaggtgatccacctgccttggcctcccaaagtgctgggattacagatgtgagccactgcacccagcccacacaccttctttagggccacgtgagctgccgcctcctccaggaagccttcctgcagctcccacctgcgcttgtccatgctgcgtggtcattgttgcagtcagtctgcccctgcaaccttagctctttgggaacatgggacaatggcctcaaattgtccagctcccaataagacctataagttgttcacatcattccaaaaggtggacctcttccttattcccagggcctggcacagggtcagtgctccagaaagatggattgattgaattcatgtctacgaagacgatatctgtgaaagctatgtctgagtatgaaggtccccaagcagctaaaggcatttgggtttgctctggtcccctaatcctgggtctttccatccccttggacagggacatggggagttctgatggggaaacgactcacgactcccaaatcactcaggaggctgttcccaagtcgctgggggcctcggagtcttcctacacgtccgtgaaccgggggccgccactggacagggctgaggtgtattccagcaagctccaagactgagcccagcaccacccctgggcagcagcatcctcctctctggccttgccccaggccctgcagcggtggttgtcacaccctgacttcagggaaggtgaaacagggcttgtccctccaactgcaggaaaacccttaataaaatcttctgatgagttcta

SEQ ID NO: 8 - DNA, 17456 bp, Homo sapiens
  DNA (1)..(17456): Uroplakine 3B (UPK3B)
cagtggggctggatactggcctgcctcccaccagagtccccccagctcctccctgctgtgggctggcctgggaggaagggggtggggtgcacttacatttgcaggtctttccagcccctggggcagcctgattaaccagcttctccagggccaagctgttgggggtgaggtgcagcccgaagcagccagaccagcccctgagcctcccgggtgctggcagctgtcatggggctaccctgggggcagcctcacctagggctgcagatgctcctcctggcgttgaactgtctccggcccagcctgagcctgggtgagtgggggtcctggatggacgcgtccagccagacccaaggggctgggggccctgctggagtgattggaccctgggcgcccgcccccctccgattgggagaggcagccccagggacccccacgcccgtctccgtggctcaccttttgtcccccgtggccacagagctggtgccctacacaccacagataacagcttgggacctggaagggaaggtcacagccaccaccttctccctggagcagccgcgctgtgtcttcgatgggcttgccagcgccagcgataccgtctggctcgtggtggccttcagcaatggtacggggactgctgtggggcctgggtgagggtgacggctgaggagagtggtgggccctaggagcccctcaccagcaagcgccttcaatgattgagcccctgtgggggcctttgggagagtaggtgtggatgaattgggctttatctaaaggggtaatatgtgtattgaaaaatacacacgtagtgaacaccaaatcccgggagtagtgctagtggtgggtttgtcagctgtcaagggctctgcaaccctttctctgaatccaagtagttcttcctttggacagggaaccgaggctgcgacctgggaggatgtggcctcctgtggggcagggccggtgcactgcaatggggctggggctggggctgggcaggttgggactgcccgctgctccccactcctggctctgggtggggacaaaaggccagagggaagctccccttcaggggtaacaaagtcgactgggtctggactatctctgggggccctgagggaggaggtggcatggggggtcagggctggagactgggcgaacacagaacccccactcataaggacaaagctgctttctcccctcccacctccatctgttctctcctcctgcagcctccaggggcttccagaacccggagacactggctgacattccggcctccccacagctgctgaccgatggccactacatgacgctgcccctgtctccggaccagctgccctgtggcgaccccatggcgggcagcggaggcgcccccgtgctgcgggtgggccatgaccacggctgccaccagcagcccttctgcaacgcgcccctccctggccctggaccctatcggtgggtggtccccaccggagccctgggactggggctgtgcttggggcggacgcattgctgggaccagggatgctctctctagcatctttccagggaggggtccccggccccggtcctcccctttgcaagcccgggctccttccactgtagagtcagcaacagtgctcacccccgctggggccgggcaaggcccaggaggagcaggtgggcaccttggggaggcgggatcttagtcaaggtgggagggggcagcttccccaaagtctaggcccctgtcccccaccacgggcagatctggcaggaaactcgggggccgagttcagacccagtctcgtcggtattaggcagggagcaggagaggtggctcctacccgctcttacagatgaggaaactgaggcacaggaggtcaagtggcctgccaacatcggggtggagccgggatggggaagcaggcagtgtgtccaggtcaggactgtccggacacaggaggaggcggggtgacctcaggaagaccaggcccaggggaagccgggaaggcagggcgtggtgaggctggaacagcaccccgctccgcccagcccccttctgccctctcacccactctccaggtccaccctctgccctccccgctgcctcaccctggctcagccttccagctccatgccccgccccatcccccgcagccactcttttcaatgccaacctgccaggtccttccccgcttcccaggccttgcagagctcccagccctgcaaagagacaaaccgaggccctctgcggggctcctggtgccctgggtcctcaggctgctggtgattgagccccctgcccccggctactgctgcccctctgggaggcctgtgacccctgccccatgtgccctgctaagccaccttcacctgctcttttggcttgtgacatttaggaaccagggcccctaaaccagcatccccggcccaggtctggtgtctggagagcaattgctcggggggatgaggggtggtggcacaggccaagtggctggagacatctcaggggattctcagagcagggccaggccatgggctgctgctcttgacgggcacccccactccacatccatgggagggccccagaggagctgcctggggcttggccctgcccagggtggtcccagcctctgaagctctcccctcctcccccaccacctcccatccccagggtgaagttcctcctgatggacaccaggggctcacccagggctgagaccaagtggtcagaccccatcactctccaccaaggtagcgctgggcaggaggggcgctgcccccagtggactcacgatctctctgggccgcctctgctgagctggccacacccctgctcccacagggctgggggcctggaggccatgtccaagtcgggcccagcccccaacagaacctcatgctgggggagtggggcacccagccagccccctcggcaggggcaccatctcggcccatccgcaagcgtttgccacattgtgggcacagacagcctcccccctcctgtagggagtcagcctgtgtcagcccctgctgggagggaggaagagggtgtggaggaggtcagggtcagggtcggggctggctggggaggcagccagcttgagttctgagcagaccccaaggggcaagcgtgaatgtaccaagcccagaagtttcgagtgccacggcccaggtgtcgggggtgggggtctcctgggagacggcttcagaggtcagggggtgtggggtggaagtcttgtcatctgaaggccttgactgctgggctccagggagcagggcagtggatgagcacgtgggtgggagcagcctagaaggtaggagcagggcggaggctgtggtccaggctggcagagaacagatgctgtgccgtcccgaggaagagggacggggggtgggatcaggggggcgcctggggatatgagacagccagaccttgaagctaggccagcgtgggtggggagggagcgagggaggagatgacagccagccctggggtcgaggggcagcccctctgagcagctggtgtgtgtgcagggaagacccccggatccatcgacacctggccagggcggcgaagtggcagcatgatcgtcattacctccatcctctcttctctggccggcctcctactcttggccttcttggcagcctctaccatgcgcttgtgagtggggacaccccctcgggcccctctcccacccagaacccctctgttgaattggtcccagtgtctggaagccctccaggcatgccatggggtttattttatttttggtagagacagggacttgctatgttgcccaggctggtctggaactgctgggctcaagcgatcctcccgtctcggcctcccaaagtattaggattacaggtgtgagccaccttgccgagccccgtggtttcgagctgggcagcgcccctcccagggcctgtgcagggaactcccaccctgagtatctcgcacctcaggggtcattgatggggccagcagcccctctgaggacaggttcgggaggtcccgcctcactcgggccctgtcttttcagtgtgtcctcagccaaggcccttctcctcccgggcctcacctgctgtctgtggatcctctggtggtttagtaagctgacgccagggtagtcagggtggccacctggagaggtggtcctccaattggttctagaagggaggaaggagggatcagagactgcaggtgaggccgggtgcagtggcacatgcctgtaatcctagcactttgggaggccgaggtgggaggatcactggaggccaaaagttcaagaccagcctgagcaacatggtgaaaccccatctccactaaaaatgcaaaaattgtccgggtgtggtggcaggcacctgtaatcccagctactcgggaggctgaggcaggagaatcgtttgaacccgggtggcgaaggttacagtgagcttagatcacaccaccgcactccagcctgggtgacagagccagactccatctcaaaaaaaaaaaaaaaaaaagaaaagagagagagagagactacacatgagggagctgggagggaggagagcaggccttgacccagcacgtgccccatgtggcagggacatatgtctcttcctcctcctctccccgcccagctccagcctgtggtggccggaggaggccccggagcagctgcggatcggctccttcatgggcaagcgctacatgacccaccacatcccacccagagaggccgccacactgccggtgggctgcaagcctggcctggaccccctccccagcctcagcccctagcctggcctctttgcatggggctgggggagatggggcgctgggagtgagtgcatggtgctttgtcccagctcctgcacccacaggccccctcagggctccttgcctttcccccccaccagcacaccccgtaccctgcctggaatcccagcaccagcccccctgcctctcctctgcctttctggtttctctccctctccaagcatctgtaagttgcactcaggagggtttaggggagggccatgggcaggctggatacccagtccccacctccatccccacctctgtctcacctgacctcctgcgagggaggctggagactgtgtggacaggccgccctgaccgcaagcttccagaccctgggaggaggcctgcagaggactgtgctttgcctgatgcagggagctgggcccatcctggggcctatgagacctgagccaccctccgtcccccatcccacacatcagtggctgggcggggtgaggattcagaggcatctctactgcccctgggcacagcacctttctgagagtgggactctccatggtcatctgactaccaattctggccaccacctccaaccctcttgtgcatatggatggctctagcccttatccaccccctcaagcatttattaagcatctgctgtatgctacatacagtgttagacttggggcttcaggcatagccggtcctgaccttggggagatgccttctctagacctgagacgaccacgtgtccagatgtgacctgttgctgtcgggggtctatcaggcccttagaccgtcaccccagtaggctctccaggacccaggagcctccatcacctggaaggaccctctgtgcaaaacctcaagcgtccatctgtgcacaaggccggtggttcccgtcgtcgccactcggggtcgccggtgagccgcagccaggccgcctcacggccagtgtgcatgctcgctgctattcgctgccccttctgcctccgaggcggtagcagatgccacgttggcggggtcggtgaaggtcaggactctaggcctccctccgccaagccagagggatgagcaatcacgcctgagagcccactgcgtgccatgcagtccgcacagccgcagcggttttctagatggagaaactgaggctcagtgacttgcccgctgcactctgtccacggccgctgcacacgcccccttgggctgcgctcccggaccttctaatgtgaccacggctcccggcatgcaggccctgccagcggagggagcccggtggtgacccttggtctgcagccctctttggaggtgaataaatgcggtctggagcccaccctggcctgaatggtgcccctgctgggacaggaaatttatgccgggagcccagggccctgctcagcttctgccccatggggttaccctgagcctgtcccttgattgctgtcccggcttgtactttgaggtgcccccatctcctaggaaaatccacacatgtgtttcagggccaggtatgtggtttaggtagtgctccctcccaagcaagcccttgagcccctcatctctggaggcttctcctccatgctgcctgcacccccaccagccaccagaaccccttcaggtatagacagaaacagattcagtcaaattccttggtgtcccaggtgacgtctggccaggggagccagcccctttaagttacactattgcatggctcacacccggaatcctagcactttgagaggctcaggcagaaggattacttgaccccaggagttccagaccagctggggcaacaacatagtgagactctatctctactaaaaatgaaaaaaaagattagccaggggtggtggtgtgcacctctagtcccagctactcgggaggctgaggcaggaggatcacctgagcccaggagtttaaggctgcagtgagccgtgatcgtgccaccgcactccagcctggacaatagagtgagaccctgtcttgaacgaacaggccaggcgcagtggctcacacctgtaatcccaggactttgggaggctgaggtgggcagatcacttaaggtcaggagttagagaccagcctggccaatgtggcaaaaccctgtctctaccaaaaatacaaaaattagcagggcatggtggtgggggcctggaatcccagctactcgggaggctgaagcaggagaatcacttgaacccagaaggtggaggttgcagtgagccaaggtcttgccactgccctccagtttgggtgacagagcaagactccgtctccaaaacaaaacaaaacacacaaacaaacaaaaaaaccccaccacggtggagcccaggtccctctgcctggaactgagagagagttaacagacgggcttggtgtctcatgcctgtaatcccaactttgggaggccagggcaggcggattacttgaggtcaggggtttgagagcagcctggccaacatggtgaaaccctgtctctgctaaaaatacaaaaattagcctggtgtggtggtgggtgcctgtaatctcagctacttggcaggctgaggcaggagaatcacttgaacctgggaaacggaggttgcagtgagccgagatcgtgccactgcactccagcttggacgacagagcgagactccaactcaaaaaaaaaaaaaaaaaaaagatagagttaaaagaccacctccctgtcagtgacccttcagcagagactgtctcacgctgttctatccagacccaagacagttggctaggggcccggccccggaggggtatgacagggagaaggagggggccgttggtgtttgctgtgtgaaaagatgaattaatcctcccagggttcaaggaccagctaggagcaggattgccatggctttttttttttttttttaacgtggagtctcactctgttgcccaggctggagtgctgtggcgtgatctctgctcaccacaacctccacttcccaggttaaagtgattctcgagccttggtctcctgagtcgctgggatcacaggtgcctgccaccacacccagctaatttttgtactttcaatagagatggggtttcgccatgttggccacaggcttttgcatgtcctggggcccttctatgtttgttctcactgtctgaatccgtgctgatgccagacgcagcgccagggacttcccattcgagcctgcagctgcccctcccttctgcacagcctctctgagcccactgaggagctgccatcaccctcaggagccacctggaacttgactttggaaacaccctctaaacagatcttggaacctagggtgtaaagactgaatcatagtccaggagtccaggggaggctactggcccccactgagagccaagggggcttcctaggggttctttctttcttttctttttcttttttcttttttttttttttgagaccgagttttgttcttgttgcccaggctggagtgcaacagtgcgatctcaggtcactgcaacctctgcctcctgggttcaagcaattctactgcctcagcctctggagtagctgggattacaggcgcctgccactacacccagctaatttttgtatttttagtagagatgaaatttcaccatgttagccaggctggtcttgaactcctgacctcaggtgatccatctgccttggcctcccaaagtgctggggttacaggtatgagccaccacgcctggtccctggggttatttctgagctgactctttttttcttttcttttcttttcttttgagatcgaatcttgctctgttgcccaggctggagtgcagtggcatgatcttggctcactgcaacctccacctcccgggttcaagtgattctcctgcctgagcctcccaagtagctgggattacaggcgcctgccatcatgcctggctaatttttttgtatttttagtagagacaggatttcaccatgctggccaggctggtcttaaattcctgagttcaacagatcctcccacctcagcctcccaaagtgctgggattacaggtgacagccaccatgcccggccttgagctgaattttgaagggcaaatggaagaaggaggccgaggcaggaggatctcttgagcctaagagttcaagaccagcctgggcaacacagcaagaccccatctctaaaaagtttttttaaaaagagggaagaaggagagaggaggagagagagctactcagagagaccaggggtgtatacggtcctgttctgcagtggcacccatggtggccaaggggtggtagcagggattgtgggctgggaagaaccagatctgaaccagggcagacacagaggattggagaggaagagttggattccagaaatatgcaggaggtggccgcaggaattgggagataaggcagatggaagaggccatgcccagtttctgatgtggcctgggcgtgaatgcaaaaattggggtcttctgtgctttgcaagtgagtgcaccaccacagtttgctttacggcaaggccccaggaaaaggggttctggggatgtcatcttaacggcaggtgtgttccacaagaacattaatacatcgttaatatttttgaaagacaagactgggcatggtggctcacacctgtaatcccagccctttgggtggctgaggcaagtggatcacttgagctcaggagtttgagaccagcctgggcaccatggcaaaaccccgtgtctactaaaaatacaaaaaatagccagatgcggtggctcgtgcctgtagtcccagctactcgggaggctgaggcaggagaatcgcttgaatctaggaggcagaggttgtagtgagccgagatcacaccactgcactccagcctgggcaacacagcgagactccatctgaagaaaaaaaaaaaagaagaagaagaacccaagggagggggcactgcccagcacaggcacagtcccatcaggccctggggagccatgccagggcgttctgcccagcacagtcacacctaaaagggtcctcagccgaaccccatccccttgaataccagctcgtgacggctttgagcagaacatgtcacgggaacggcattgtgcagaactttttattaaatggcatttaaaatattccccaggactgtgtagttggggaaacaccacaaaatccattggccgggaacataatggctcaatggttcgaaacaaatgcattgttaaaaaggaaaaacagcaactgttgcggggtaatgacttgcagatgactcagcaggccaaacatcaaaggaattcggatggcagcaggtgggcacaggcagccaggaagcacccctccctcgctctcacttccagcgatcgctttacctccctggagtgtctaagccacccatttctctccatcatccctgcaatccccaagcaagagccaccttggtctcccgctgggatgtccgtggctcctctctagctgaactctccatgtccactcctgcccgtcgcccattcccctctcagtatccagagggaccaggttctttgttctttttttttttttaagatagagtctcactctgttgcctaggctggagtgcagtggtgtgatctcggctcactgcaacctccagcttcaggttcaaacgattctcctgcctcagcctcccaggtagctgagactataaatgtgcgccactgtgcctggctaatttttttgtatttttagtagacgggatttcaccatgttgaccaggctggtctcaaactcctgacgtcgggtgatccacctacctcggcctcccaaagtgctgggattacaggtgtgagccactgcacccagccaggaccaggttctaaacctgatcacatcgcacctctgctcccataacattcaggaacttcacactgcaagaacagaatctaggttcagacaggtgtggcggctcacatctgcaatcccagcactttgggaggccaaggcaggcggatcacttgaggtcaggagttcgagaccagcctggccagcatggtgaaacgccatctctactaaaaatacaaaaattagccaggcatggtgatgggcgcctgtaatttcagctacttgggaggctgaggcaggagaattgcttgaacccgggaggcggaggttgcagtgagctgagatcacaccactgcactccagcctggatgacagagcgaggctctgtctcaaaaaaagcaaaacaaaataaaacataccaacatctaatctctataaaatatttttagaagttatccaggtgggccgggtgcagtggctcatgcctgtaatcccagcactttgggaggccgaggcgggtggatcacttgaggtcaggagttcaagaccagcctggccgacgtggtgaaaccccatctctactttaaaaaaatacaaaaattagccgattacaggcatgagccaccccaccaggccatgctttcagttttcaagaaagaagacaccattgttgccaaaggttttggtaatttgagagatacaatgtatgttttctccatgtggatcctagatagtaaggatctgttgaatttgaagtatctatccagaagtattttgggtacatgtttaaggattgtaaaacagtgtttctatttctggatataataaatgtatttgttaatataataactgaacagattagacccataaactatttacagtgttgagtcatttcccacagttaaaatcaggatgaaaatatatagctgaatacttgctttgtttcttgtaacatttctttagtacagaacctgctaaggccatcaaacctattgatcggaagtcagtccatcagatatgctctgggccagtggtactgagtctaagcactgcagtgaaggagttagtagaaaacagtctggatgctggtgccactaatattggtaagtttgggagagttttaagccacaagaaatgattagtgtgtgttgttgtagtcaagaaacatttgttattgaaataagactatcaagtgttgatgtagtaataaactattatttttaagttaaagttagcacctattatgtgcctagtacttagctaggtagtaataataataacgacagcttttcttgtgttcttatggtgtgccaggcaggtgttatgctaagaattgcacagaaatatctcatttaatttgcagaatagctgggcgtggtgtctgacgcctgtaatcctagccctttgagaggctgaggtggggggattgcttgaggccagagttcaagaccaacctggccaacatggtgagacctcatctctattaaaaaaataaagcaggccgggtgtggtggctcacacctgtaatcccagcactttgggaggccaaggtgggtggatacctgaggtcagcagtttgagaccagcctgtccaaaatggtgaaactctgtctctactaaaaatataaaaattagccagacctggtggcagaagcctgtaatcccagctacttggaaggctgaggcatgagaatggcttgaacccgggaggcagaggttgcagtgagccgagatcgtgccaccgcacaccagcctgggacagagcaagactccgtctcaataaaataaaataaaataggcgtggaatagtggctcacatctataatcccagcactttgggaggtggagcagggctgatcatttgaggtcaggagttcaagaccagcctaaccaacatggtaaaaccctgtctctactaaaaatacaaaaattagccagatgtgatggtgcatggctgtaatctcagctcctcgggcggctgagggaggagaattgcttgaacctcggaggtggaggttgcagtgagccaagatcagatcatgccactgcattccagcctgggtgacaagagcaaaactccatctcaaaaaaaaccaagaaaaaaagaaaataacaaaataaaataaacctaaaaaattattaatccgctgagtaactttatgagatagaacttattatcttcattttacagatgaggaaattaaggaacaggaaatttcctttttttgagattataaagctaataaaataggatccaggaagtctggttccagaagcagttgtcttatgttttttttttttttgagatggagtttcgctcttgttgcccaggctatagtgcaacggcacgatctcggctcaccgcaacctccgcctcccgggttcaagcaattctgcctcagccttacgagcagctgggattacaggcatgcaccaccacacctggctaattttgtatttttagtagagacagggtttctccacgttggtcaggctagtctggaactcctgacctcaggtgatctgctcactttggcctcccaaagtgctaggattacaggcatgaacaaccgcgcctgtccccctttctccttactgggtatgttaaaattatttctttcaaaagaaaaggctggtcaaagtgcaacggtgttaaccactaattgatcacaaccagttacagatttttttgttccttctccactccaactgcttcatttgactagcctatggacaaaaaaaaaaaaagaggaaagaaaaagctaaactatttaatctgggctagtaaatggccagaaagggctttataaaaatgaaatatacaaatatatatatatatttttttagacagagtctcactctgtcacccaggctggagtgcagtggcacagtctcagctcactgcaatctctgcctcccaggttcaagtgattctcgtgcctcagcctcctgaagagctgggactatagcgtgcaccaccactcctggctaatttttgtatttttagtagagatggggttttgccatgttgcccaggctggtctggaactccaggcctcaattgatctgcgcttctcggcctcccaaagtgctggaattacaggcatgagccaccgcaccctgccctacatatacattttaattataatatcttttggattctttaaaaatttaaaaaaaattttttagttctttaaaaaattctttaaaacaattttatttgaagagtaataacaaaacaaatctctatttgtgaataaataaaccttgagatcatttatggttttgcaattcaacctgaaaaatgaaatcaaagcttttatcaaaacaaagcatgtttagtgctctctgtctcactgtcttttagatgccaaaccttagattttatgatgactcctcaaccgtttagatcttggttatctcagagggatcgtcagctttttaagaaagttttgagagaaaagcaagtgaagaaaagcatagtcaatgctcaacatcacgggtctctcactgaacacaccacgcctggtattctctcacagcgatgtcaccatttctacctgccacgcatcggtgaaggttgggactcgactggtgtttgatcacgatgggaaaatcatccagaaaaccccctacccccaccccagagggaccacagtcagcgtgaagcagttattttctacactacctgtgcgccataaggaatttcaaaggaatgttaagaaggtacagtaaattaatcttggttttcaagagtattggttaatgcacatgagcaaaagatttactaaagatgtttattcttcagttgattctcttcccataatctattgagaaatgctttatttgcatttctcgttaaagacttaacattaaagacttaactttagggtgatttacttttttcttttcatcacatagtgtttattaggactgggcaacatagtgagactctgtttctatgaaaaattaaaaaaaaaattgactgggcatggtggcatccacctgtagttccagctacttgggaagctgaagtgggagattcacttgagcccagaaacttgaggctgcagtgagctatgattgcgccactgtatttcagactgggagacagagtaagaccctgtctggaaaaatatatatacatatatatattttatttttattttttatttttatctttttttgagatggagtctcactttggcgccctggctggagtgcagtggcacgatctcgattcactgcaacctccacctcccgagtttaagcgattcacctgcctcagccttctgaatagctgggattacaggtgcgcaccaccacacctggctcatttttgtattttcagcagagacggggtttcaccatgttgtccaggctggccaggctggtctcaaattcctgacctcaggtgatccgcccacctcggcctctcaaagtgctgggattataggcgtgagccaccatgcctgccttatgtacttatattttaatgagactatttctcttggttttctgataaatgagttactggaacccttatgaatctgaatgcaaaagaaacagctaaatgttatgtaattgttgtgtttaaaaaccagattataaaactatctgtattatatgattacggttttataaaaacaaaacaacggcctaaatgtgtatagtataaaggctggaagagtcagcactttcatgttctcagcggttatccttggatgtgagatctcatgcactttttgctctcttctttgtgcctttccattttgtatgtgtattttttacaatctaaaaagttacttaaacatatgcagctaaaaactttttttactcgtaaagcatttgatgctaattttaactgttcttttttagacagagtcttctgactctgtcgcccaggctggagtgcagtggtgtgatcttggctcactgcaacctctacctcctgggttcaagtgattctcctgcctcagtctcccaagtagctgggattataggtatgtgtcaccatgaccagctaatttttgtatttttagtagagatagggtttcaccatgttggccaggctggtcttgcacccctgacctcaagtgatctgcctgcctcagcctcccaaagtgctgggattacaggcatgagccaccacgcgtggccttttttttaaagcttttttgcaagtcagctagcaagaacacaggaagaaatactcaaatctcccttacccagctgggggctatgtcaggttttataagcatagggtaatgagttgtgatttgattggatcttgcaataaagtaatgctgggaggtgtgatctgactggatcctgccatggggtgacagcaaaactcaatctgattggatcctggctcctgtcatggagtgtccagttcttaaatcagtctcagctcttcaggccgagcttttagttcccactccgtggtggcatgcttggttaacctgggcatgcacagggtacatgcccttcaacctgtgggtccatggcaattgaaaaacaactgacaacctcattacataaaagttgaactgagccgggtgcagtgactcacgcctgtaatcccagcactttgggaggccaaggcaggtggaggtcaggacttcaagaccagcctggccaaaatggtaaaaccccgtctctactaaaaatataaatattagccaggtgtggtggtgcacccttataatcccagctatctggaggctgaggcagcagaatcacttgaacctaggaggtggaggttgcagtgagctgagttcataccattgccctccagcctgggtgacaagagtgaaactccatcaaaaaaaaaaaaaagttgaaccagatttggtctgatgcagttacagatctacaaacctcacccccaccctcctgccaacaccttccactcctcattcttgagggattagggatggaggtcatgcttctgcttcgacttcatgctgagcagggcactgagtcccctaaagtgaaaggaatgaaactcttgggcttctgagttcaaatgagttctggggtcacccggagtagcttgaaaggctggtattgttgtaatacaagctgaaggtggaagtgttggagcctggaggacaaacagctcaccatccatttaaataaataggaccaaaaagtaacagaacagtggccacgaggggccccaacagaggaagaaaccaggtgaggtgcggtatagtggactcgactgccttctaaatctcagttgttggccaggtgcagtggctcacgcctgtaattccagcaaaagaaaagccaaggcagggtgatcacgaggtcaggagttcaagaccagcctggcaaacatggtgaagccctgtctctactaaaaatacaaaaattagctaggcatggtggcatgtgctgtagtcccagctactcgggaggctgaggcaggagaatcgcttgaacccgggaggcggaggttgcagtgagccgagattgtgccactgcactccagcctaggtaacagagcaggactccatctcagtcaatcaatcaatcagtcagtctcagcggttgaactacccttgacatggttcagctctgtatccacacccaaatctcatgtcaaattgtaattcccagtgttgtgggagggacctggtgggaggtgattggctcatgggggccgacttcccccttgctgttctcgtgatattgagtgagcgcttgtgggatctggttgtttaaaagcatgcagccctcccacttcactctctctgtctctcctgctccaacatggccagacgtgcctgcttccccttcgccttctgccgtgattgtcagtttcctgaggcctccccagccatgcttcctgtacagcctgcagaactgtgagtcaattaaacctcttttcttcataaa

SEQ ID NO: 9 - DNA, 5767 bp, Homo sapiens
  DNA (1)..(5767): Uroplakine 3BL (UPK3BL)
gacaggggagcctctggggctgcagacactgcagacggacggacagacagatggacaacagctggaggcttggcccggccatagggctctctgcgggacagtcccagctgctagtgtcgctgttgctgctactgacccgtgtccagcctgggacagacgtgggtgagtaagggtggggattggcacaggggtacccgctgcatctcaggctgcaggacaaacccaagacctcactttgtttccaaattctcacacatggctcctgcctccttcctttccctgaggagaggtttccagatgtccaggacaatgcatgtccccaggaagctctggtaagcccagcctgggcaacataacaagaccccttttttcaaaaagatttttttttttaagatttttgtttttaattagctgggtgtggtggagtgcacctgtaatcccagctacttgggagactgaggcgggaggatggcttgagcccatgcagtgaactatgaatgcgccactgcactccagcctgggccaaacagcaagaccctgtctcaaaaaagaaaagaaaagaaaaactggacaggctgagagatacagtcctacaatctctgcccccaaccccaatctctgactgctccgcttctctttttctttttctttttcttttttttctttctttttttttttttttcgagacagagtctcccactgtcacccaggctggagtacagtggcgcgatctcagctcaccacaacctccgcctctcgggttcaagcaattctcctgcctcagcctcctgagtagctgagattacagccgtgcgccactatgtctggctaatttttgtatttttagtagaaacagggtttcaccatattggccagtctggtctcgaactcctgacctcgtgatatgcccgccttagtctcccaaagtgctgggattacagacgtgagccaccgcgcccggcctccacttctctttctaaacattacgtgcctcctgcacgcagagtgccctgggcttcagagataggactgagagctgtaagaaaggaatcgtgacaatccttccccaaggaagactctagcctgaacctttggagttgagttgaattcaacgtaaatgaatgaagttgaactgaactgaactgaacaggggcagctgctggagactcacatagaaacccactccatcgttctgcttctcctagaccagtatttggggttggggaggtctgagctctccaaccagcaaggctggacacaggccaagttgccaatcctgagtcccctttggggtacagacctgggaagcttgtcctcgtcccccacccttccccagagagatgaggtgggagtctgagagggggacctggtcctgaaggcgaagatgcctcggggccatgttgggaggcggcagagaaccaggcaggttgaagaggacgttctagactcactcggaaccaagctctggctccagagcccccggaccctctgggcagtctgtgtcccagcctggggtctcagccaagaggaccttcctgtgccatccccccgacccctgccaagccacgcatcctctcatcaagcaaaacaacctagaccatgtgggtggagctggagggacttaagttggaggtcactgggcatgtcaggaacagagttcagcctagggtcaggctgcccccaaattccagttccatcccaacatggcccggcccaggagaactgtgcctaccgccagggtgggacctcccatgccaccattgtcctagacctcccacagtgcccacccccagtaggctcctaagagaggggccaggggctggactcaggcctcccacccatgcccatggggcatagagttgccgggaaagcttcctggttcataccggacctgacctcccaggaagtgcccgtaacttggggctcccatgttaagtctggatctgggcggggggagaccagagctgttggggcttggttgccccatttggactctcctctctgccctccccttccagctgccccagagcacatcagctatgtgccccagctctcaaacgacaccttggcggggaggctcaccctgtccaccttcacgctggagcagcctctaggccagttcagcagccacaacatctctgacttggataccatctggctggtggtggccctcagcaacggtgggtgctgctggggccaggcttcggttttccctatgtgaaatgggcctgcgggcctaagggcagtagcgggtgtgttgcagggagatgcagggagcaggtgctgcaggggatggggccggggagggctgtcaggcttggtaaggtgagggtgggatcctgctgtgtgacctgtctgaccatggtgccacccttagccacccagagcttcacggccccacggacaaaccaggacatccctgctcctgccaacttctcccagaggggctactatctcacactgagggccaaccgggtgctgtaccagaccagaggccagctccatgtcctccgcgtcggcaatgatacccactgccaaccaacaaaaattggctgcaaccatcccctaccaggacccggcccctacaggtgagcagctctgccaggccctggctcctgcccgcatgcacccaagccggagcctggggcagctcctacgaggctcaccagggccccagcaggatgcctgggtcccctgctcctgcttggccaaagggaagaggaagcagcaggcaggggctagggaggccttcatgaattacatgaattatccttcttctcttttttttttttttccttttcttcttcttcttttttttttttttttttgttttgttttttgagatggagtcttgctctgtgacccaggctggagtacagtggggtgatctcggctcactgcaacctgtgcctcccgggttcaagcgattctccagcctcagcctaacgagtagctggaattacaggcatctgacaccacacccgactactttttgtatttttagtagagacagggtttcgccatgttggccaggtacctgccaccatgcctggctaatttttgtaattttagtagagatgaggtttcaccatgttggccaggcgggtctcaactcctggcttcaagtgatcttgaaggcccaccttggcctcccaaagtgctgggattacagacgtgagccaccatgcctggcctatcctgcttttcttgagcagaaggttccccacctcaagccccagtccccacaggctgtgtggaccactcaggtggcgtctctccatccagacagggtctcccctcactaaatgcttgattcacgcatgttcagttctgagacatctaatactcgccctctacctttcccaaatgaggacacagaagcccagagagggggagggacgtcacaccactggaaatgtcacacctagatttgaacccattctgttgggctctttcgccccagcctccggccccctccccgggctgctctcgccagggcctgggactccaggggacagacttgcaggcaccaagtctgatggtttcaggactccgggggacccccatgtccaatgctgggtctcccattcagggtgaagttcctggtgatgaatgacgaaggacccgtggctgaaaccaagtggtccagcgacactcgcctgcagcaaggtaggggccagaggctccggtcaaacagtaggggcagggggctggggcctgggggtcctgaggactgaggatgggctgggggaacaggtcagctcaccactgagtcagaggcagccaaccatcttgcaatctgcaggcgcccctcccccagccacccccttcccccaggcctgggtggtagtaggggaggcagggcggtgattggtctggattctgcccaagggccccttccggtcaggtaaaatttcttttcctgcccgcctgtgcggcccccatcactgccctcagcccaggcacttcgggctgtccccggcccccagagcccgggcaccgtggtcatcatcgccatcctgtctatcctcctggccgtcctcctcacggtcctcctggctgtgctcatatacacctggtgagtggaccgggctgagaccgcccatgcctcttgggaggggcggggcccttgggcattaacccctccctctctagttcctccccgcccgcccctgcccaccttccaagcgggcactgtgcaccccctggtggcagcatctgggattgcaagtgggtgccgcctgcggacaccccagtcggggaggcgcccaaggaggaggtgaattgctttcacaccaagctctgagcattgcctcaagacgccatacaggccgggtgcggtggctcacgcctgtaatcccagcactttgggaggctgaggcccgcagatcacctgaggtcaggagttcaagaccggcctggccaacatagtgaaaccccagctctactaaaaatacaaaaaattagccgggtgtggtggcacgtgcttgtaatcccagctactcaggaggctgaggaaggagaatggcttgaacctgggaggtggaggttgcagtgagctgagattgcatcactgcactccaacctgggtgacagagtgagactccatttaaaaaaaaaaaggggggggtgtcaggatttcatacagagctcaggtgcctgagcctggggcacagagagtgtccacaaggcttcctagagaaaaggggagacctagccctgttgggatttggggaggagggggagagggagtgactaaaaagggggtggggaggtgtgggggcaggaggggcaggaggggtgcatgcagccaggccaggccaggggccccaggtgcctagctgaggaactgggctgtatcctgcagcctatgggagccgggagtgggttttgatcaggggagacaggcagataatgtttgagcggggtcctgaggtgtggagggtggagggggagagtgatggggagcaggagcaatgagctagatttgtgaggtttgaaggaatcgcctcagtccctttggttaattctgcccagccagtggagtctcagtttcccctatgcgatgggtcagagcatgctagccaatggctgtgggatctcggccagagcctttcttcagcatccatcatctctccctctctcctcccctcccaagcttcaacagctgcaggagcacttccctatcaggcccagaggaggcagggagtgtgagaagatacaccacgcacctcgcgttcagcactcctgccgagggggcttcctgaggggttccagaggggcccacgtgtccctccacctcctccctggcccaggctgcagagcctgagctgggacacgccctgaagcttctggaccctgagagagattgtttcttttctttactatttttttttttttttttttgagacggagtctcactctgtcgccaggctggcgcgatcttggctcactgcaacctctgcctcacgggttcaagcgattttcctgcttcagcctcctgagtagctgggactacaggcacacgccaccatgcccagctcatttttgtatttttagtagagatggggtttcaccatgttggccaggatggcctccatctcttgaccttgtgatccgcccgactcggcctcccaaaatgctgggattacaggcgtgagccatcaagtctggcgagagagattgtttctagatgagggtgggggcgggtgtccttagcccaaagcttgtgccagtctctatcggaaataaatgcccccaaaacctc

SEQ ID NO: 10 - DNA, 127226 bp, Homo sapiens
  DNA (1)..(127226): Bcas1
actgggtagaatacttggggtgccagggaggcattaatgcgagaggagtcaggtgctcagtttttattggagttgggagggcagccccacatcaggaagagaacctgtttctgcaggatggtccggggagaagggaggactccacccaggcttgtgtttgccctgctctgtgtattcagccagcaggctctgcacaaggaagcaaagtgcagggagccaggctccaccgacagccaggcactgggcagcacgcactggagacccaggaccctgtgcaggagcagctccgggtgacacgaggggactgaagatactcccacaggggctcagcaggtaactgctttcagatcctttaggcatggctggagggtttgctgtttgtggtagacggtgtcatatagaggccaggggtcagacagggtcaagtttgatcccagctctgccttctgttcactgtgtggccttggatatgtgtaagcctcagttccactatctgtgaaatggacccaaagatagcactcatctcaaagtttttagttttacaaggagcaaatgacaatgtggtcagtgttaggcgcatagccacataaataactcctatttggtggaactattgagggtcatttcaagcacaggacatggggagaagtcactggatggagggataggctgtgtgatttggggatccgtcagggcaagaatgccccatagccgagtggaatctgagccttcacctcaggcattgcctaaagaagtgggaggacaagaaaaaggacttgtggagtgccttttgtgaatcttatttaacgctcaagaccaccctatgaggcagctgctgattcaaatcctggcttcaggacccctgctgtttacatctccctctgaaccagtttcctgcctggaagagtcattgcgattagaatgcgggtgcgctgcagccacaccgccagatgccagccccagctccaccctgggctggctgggtgccctggagcaggttccctcagccctctgggcctcagtttcctcatctgtaaagtgaacctaataacagtactgagatcaaagggctgagaggactctactgcccgtaaatacctgtgcacttagtaactcttagctgtggttcttgttttcgctgttaccatcgtctccattttacaactaggaacatgaagctgggtgaagagggagctgcatctggttccaggtctcatggaaaggatgctgtggaactggagtccagtcgggcctgggatgagggtgcagccagtgagactctcaccttgggcacgaaatgtaagggatgccaaaaaactcagtcatggagataaacggtatgttaacacaacatttttaaaagtcagaattaatggcaagacacccgtgatgaacaaactatgaacatgttacagaaagataagatcaggaacagcggtaattttgattttcacaaatttcatgttaaaatactattcatctccatggctgagctttttggtgtcccttacattgttcccccggagtccagggcctgatccgcctcagcctcctggggatcctgagctgatcacagcagcttcaggccctgggtgtatatactcagggtatgtagagggtgcttcctcctaaataaagacaacagacggggcggggcatgctaaagtagtttctcatttaagtgagggtgggggaacaaaccaatgtcccaaatcacagaagattctttttttccaaagagttctggaacccagaagggttttgtttttaggaaaaaggcatgagctttgggaaaagcaatgggcccgttaaagcccatggattctgcctgctttaccatgacaagagatgtggagggagaggaattgaaaaaggctttgggttgggggcgggggtacctttgcaccttgcaggctcatctgtcctgctggagtattagatgtgacttgattgtctctgtgtctgcagcttctcttcaagccaagtgccctgccctgaagcagttcaggatttgagtgcctgagtcacgtggacccaggttcaaaccccaggtgtgcctccccgtagctttctgactgctactcttgggcaagtaggactagtaaggtgcctaccctcatggaggtgacgttcgtgagatgaggggatggcattgctcagccttggtttctttatctgtgcaatcagggaataatgggactctgcaagggaaaaggagacaatgtgtgtgaagtgcctggcaccagggtcagggcaagggtgaagccagtgagcacctgggggataaaatgcagggaggcgctcactctctgctgccgattctgcaccagagatggttgccttcctatattttgtgtcctgctatgctcaccctggtgctgcctggcacatagtaagcctccaattaaaattacctgcgattatcatgcacttaacaatgtttggtgcaataataagactatgagagcgagctctaagatttttaggattaccatccgtttgtgcaaacataattaagtactccgaaagcaaaacatcaatcaccaagcagccctaaaacatccaaggtgattttgatcaaggcacccctgcccctggacccacaaagtcccataccaggaatcagggcttgggcagttcagtgaggactggatttcagttccctgtgtccccttgtacaggaggcaacctgtagcactgtacctggcactcctgataatagctgccgtgttcctagcactgtgcgggcacacacatggagctgcaggactgtggggcaggcaaagcggggttgttctttcctcctgcaaggtctttactgatgttgggggcagagggctggttctgctgggtgtgccagcctggccatgttggcgtcaccctcagctgagcagtgaggagggcccctgggttacctacattccattgcattgatcgaaggtgttgcttgtttacttggtgactaattctgtcaccattccacccttcaaaaccaccccccctcccattcaacagtcgtctagctgcctgctggtgatgaagtttcagaagtgctttctccaggccagcttgcatggggtttggcgtttggcctgtttccaggaggagggcctattattaatctgtaactacaaggaggcgacatggaccatcaatcactgtgtaaaagaggagggatttgagggcagcttccaggaggccaattcactcatggatcagaacacagaactaactcaattataacaataataagataaatgaataatattagcaataactaacgtttactcacctgagtactgccaagccctggcgctaaatccttacagtgattatcagtgacccttcaattgttcaatcctcactttatttgatttatttatttacttattgagagagtttcattctgtcgctcaggctggagtgcagcggtgtgatctcggctcactgcaacctccgcttcctgggttcaagcgattctcctgcctcagcctcccaagtagctgggattacaggcattgtgcctccacatctggctaatttttgtatttttagtagagacagggttgcgccatgttggccaggatggtctcaaacacctgacctcaagtgatccacccacctcagcctcccaaactgctgggattacaggcatgagccacagcgcccggcctaatcctcactttagattgtaccatatatattccttgcctagttataattttctcattgcaagaatgaatatgcaggaaatattttctattccatgttctattatattacatataaatatttcataaaactataacatcacttatacagcagaagagacagtagaaagtatgaaaatagaaaagttaaaagtctaaactctggacttgagtttgcgagggttaagtcctcattctcccacttactagaagatgatctgtattagtcagcttgggctgtggtaaccaaaacaccacagactaggtggcttaaacaacagtcatttttgttttctcatagttctggaggctggaagtccaatatcaaggttctggccgatgcatttctggtgagaccactctttctggctagccaacagctgccttcttgctgtgtcctcacacggttgagagagagacagagagagctctttggtgtctctttttataatgacactaattctatcagatcaaggtccacccttctgatttcatttagccttgattccttagaggccacatttccaaatgcagtcatattgcacgttagggcttcaacacgaatccaacacgaattttggaaggacacatttcaatccatagcatgatcttaagtgaggagtttaagttccctgggctcaggttctgcatctgtaaaatggggacaataaaaatacctgcctcggccgggcccggtggctcacgcctgtaatcccagcactttgggaggccaaggcgggcggatcacgaggtcaggagatcgagaccatcctggctaacacggggaaaccccgtctctaccaaaaatacaaaaaattagccgggcgtggtggcaggcgcctgtagtcccagctactcgggagactgaggcaggagaatggtgtgaacccgggagacggagcttgcagtgagccgaaatggcgccactgcactccagcctgggcgacagagccagacttcgcctcaaaaaaaaaaaaagaaaaaaaatacctgcctcatcgggttctgataaggaagctgtgagttaacacagagaagcattcagagcaatggctggcataaggtaggcgctacaaaaatattaggtattactactgctaatgtatggtccattttatttactgcttatactaacagcttatctctattcctcagctgctgtgcaccagccacccagttatacaacacatgggccacacccttctaatcttcacaggagctccacgcaaggaatctattatggtccttccctccacccctcacttctcagacacggagccagggcttatgcatatggccagggtgagccagaggggagcccaggcagagggcttgcgctatttcaccaccacagacgaatttactcacgtgcttttcagaaatgcagatccctaggtgacacctggctacaaacacgaggagaacatccccaagtccaggcactagagcagggcccctcaatatcagcactagcgaccctcagcaaagcagacaattcttcgctgggggaagggggcggtccttggcattgcagggtatgtagcagcgtccccagcctctacccaccggataccagtgcacgccccccaaagctgaaccgtgactatcaaaactgcatgcaggcatttccaaatgccccttcggggccaaaatcgctcctgactccagaaacgctgtgctccacttattgtgagggagaaacaaagaacagcatatttccaaggagaaaacgtttagcaaagcaatgtaagtcatcgaggaataggacaagatatccaaaatatgaaatatagatatatagtcctggaaaattggtaccaaaataaaataccctaaacattgtaaatatgttatatatatagtgtgtgtgagatagatagataaagtagatgatagatagatagatagatagatagatagatagatagatagatagatagatgatagatagatactcatcataaagttgaaatattgtcagtcgaaccatcatgagttgagtttgggacatctatatcactaatagctactaggtgctcgccctgccaggcactttcccatcacatttaccccttcgcacggtaccacgatgtatcaggacatgccactcaacctctctgtgctccggcttctcataagacaactgggaaaataaaagtacctaactcagagagttgttgggaggaccaagagaggcaaatatatgcaaatcagaactgctcagcacagagaaaacactctaaatgtgtttattattgccaccattatgaatactgtcattttccacaagaaagatactttcagaagggtcaagtgctttgcccaaagcctcacgatcgtgggattttacggatgcctgtctcactccagatctcttgttctcaagaggagagaggggaaccccagagatgcaggagagcgagactgcggagggcagcctccacccacctccggtggggcatctgggcttgcttctgaataaccagctggaaagcctgccctgcccgccagttctgggggaagggaagctggaggcccaggacagttctcttgatttgcaagctcacgaaacagtgcgtcagcaaagcagtgcccctagaagggttgtgagtgtattcaggtgcctgggtgatggtggtctgtggactccgaagcctgagctattcctccgtctgagaatccgtgggtttggttgtctaggtcagggtaggcagcagccaggagagttctgaccccaggagacactcactcactcaccccagaaatatccaaaacaggggctctcagccatggaaatcacctagagatcttgaaagtaccccgatgcccagccccaccccagagaatctgctgtcatcagtttggcaggggcctgggcatggggatctcagaactctgtgggaggttctcacatgcagcccagtctgggcatgggcccccataacacaggcaggaggcggggaagtgaaggggctttctcatctgaacctccacaatcaacccccagtggcaaagtgccaaaccctcaaacacaagtctaatttcaaaaacaacacccctccacccaccatagcttcgtatgtttaatgtaaaataaggtcataaagacaaaacactcatataatcagttcatgaaagaaagggcattttaacaccccattcaaactttttctttttcaaaaatgaaagttagctctttcaattgtacgtttatcatgaaaaactctatctgatttatttttctcctttttgagaaatgggagaaaactattacagacaagaattactgtctgaactgccttgagcctcagttttcccatctattaaacggggatttaaaaaaaagtctccacccaagtcattctggtttgcccagggttttccaattttaacataagagtcctgtgtcctagagcatcctcactcctggaaaaagcttgaagatggtcaccatcacactattttctataggtgtctgatcatgagaatcactggggcatttgctaaaaatacaaattccagggccccaaattgacttttcggtgagaggatcacaggaatcagaaatgttgctggattcctcggtagagtctcactaccgggcacctgtgggagaaactggcttcaaagagcaaggatcatacccgtgagagtcctactcatgctaactcttgtgcagtcctctttatgtgccaggccctgttcagggcactttgcttatattcactggtttgactccataccagccccttgagatggaggctataattatccccatttttacagatgaggaaactgaggcccagcgaggctcagtgatgctcagggattccaaactccagagcccacattcctatcctatgtgctacactgatgtctacatagagcttcagcactgggctggcatacggcaagctctccatacaagtcatatatggttatcattattacgagttccaggacctttggggcactgaaggagttgccatcttcttgccaactgtgaacagaaggcttcattgcaaaacatcaaaatgcttctttcagccttcccagttgtttggacctagtcctgtaggctgaattcatttctgctaatattgacatcagccaatagatggcagtaaccttttgcttttgtcccacccagatgaatcctgttctttaaaaggttgatggacaggcaggagcaatttcacgacacatgcattatatctgctggtggagagtgacaatatctgaatccaggttatcactgaaaaagacacgccattagattttccttctttcagggcccttcaccttgaagtggccgagaggctacttagggtgtgcaatgatcagaataatgtaaccccaactctgtgggaagaaaaatcttctctcctacttctgtacaccatgcgtcttccagcaccaaggtttttcataacctcaagtgttgattcaaagtagctttgttaggattgaatttacattaaatagtaagagctttaaaataaagcttgtaatcctactgttaaaataattttaaaacttgttaaaagctgaatttagatagagatactttgtgtgtatatattcttgcatgtgtatatatgaacgtatgtgtttgcgcgtatccttgactgagacatttaacctgcgtgcctcagtttccacaccagcaaaattgaaataataatacctctgtcttgttgaattgctgcaaagagcaaattagttttactgcaaataaagctcctagaagtttctcaacagatggtaagcactcaccaaatgttgttattgttattactctatcatttctatgattttttagagttgttgtcattgtttttatacacagtaggctcaaatcctggtaaactttctgtaaagagccagatagtaaatatcttaggctttgcaggccataggtgtctgttgcaactactcagttctgccattatagcatgaaagccatcatagacaatatataaataaaagggcatgactatcttccagcaaaactttatttatggatgccaaaatttgactttcatataattttcatgtgtcacattctatgattcttctaatttttttccaaccatttataaatttaaaactcatttttagctcactggcctactaaaacaggcagtgagctgaatccagccaccgctgttctttgccaaccctggtcttgaggattcaatattatattattcataatgtcccattaacagacagaagcgatgatctgatgcaagtgtgtgagtcacggattttataaatagaaaatagcacaaaacaacaagtgtcctacatgttttaacagtgctcagctttattatgtggtatgatcagaagacatacaaaatccccagatttggttatgtattaaattcctgcaagagaacacatggtgagatccatgaccctttttttggcctcctcaatatctaattgctcaatgcgtctactaccagggaataaaaactcacaccaatggcgagagatccacaagaatccctggtgactcattgactcctttcagccagaaatcaaaagtcctaatttttattccgagagccactagagcagataagccagaagctaggtctttggagatgggctacattggaattacatgtgcaaaagaactttaggtggcaagacagcaggcctttggagtggctgcaagagtccttgtgtagggatcagatatactaggagtcaattcctcactggatgtttgcccttggtgggtcttggaggttccattcctcctttttaagggaagctagtaatatgcagaacattccggtggttaggagcacagccagactgtgtttgaatcttgctcattaactgggtgacctttggaaaatgatttaaccccctcgagtttcggctacctcatatgaagaatgaaatcatgatacctctatctcacaggagtgctataggactacatgagacaatacaggtgaagcactccaaaattagagcttggaattgagaacatgctaagtaatgatttgctattatcatcattattattatatatcatacattattataacgaagctcttcagaggtttggtgatgatgtggtcatgtacctaggtctgtgcctcatatgtgagagatgctatcaatcgttattccctccattgactaacaataattaagctcccagtaaatgcaaacacactgctaagattaggagatacaaaattgggtgaaggtagacactgcctttgacgtcagggtgcttacaatttcttgtggaagggagacataaattaaatattcaactttgcccttcacctatgggacaataaccacattaacagtcatttcagaaccatcctacccagcagtgccacaacctgccatctcccatatgatcccatctcacgtaatgttattaattacttttattcgaccaggcgcagtggctcatgcctgtaatcccaacactttgggaggccaaggcgggtggatcacatgaggccaggcactcgagaccagtctggccaacatggtgaaaacccatctctactaaaaatacaaaaaaaaaaaaaaatagtctggtgttgtgccacgcacctgttatcccagctactcaggaggctgaggcaggagaattgcttaaacccagaaggcggaggttgcagtgagccgagattgcaccactgcactccatcctgggcaacagagagagactccgtctcaaaaaaaaattacttttattcataacttagaaccctatgcatttttgtttaataagcagatatgttttgcttaacatgagctagacattgttctaaccacgtcacaagcattaactcattgggtccttatagcagtcttatgaggcacagagaggctaattaactctcccaaggacacacagctacaaggggcagagagaggattcatgcccaggcagtcttgctctagagtctgtggtcataaccactgtgccatgctgccttgaactatcagaaacaacctcgtttgtggatttattgttcctatgttaactctctccctgtgcaccatacttcagctccatgaagtcagagggccttgcctgtttaatttacagctgtaaccctagtgcccagcccagcaacaggtgcagagctgtgctcaatagacacagtcatacactgcataatgataccttagtcaatgatggaccacatatacttagtggtcacatgacattataatactatgtatttactggactttttctgtttcgatatgtttaggtacacaaatacttcccagtgtgtcacaatttcccagagtgttcaatgtggttgcgtgctgtgcaagttagtggcctaggaacgataggttataccatacagcctaggagtgtagtaggctatactatctatgatgttcatacaaccatgaaatcatctaatgatgcatttctcagaacattttctcgcccttaagtgacacatgaccatatgtgctaaatcagtgaaagcatgaatatatacccaagtaagtatataattacaagccctgctaaatgctatgaaaaaaaaaaggccgtagtgtaaaaggttttaataggggaattaatttagtttgagaatcagaaaaaaatattattatttcaattaccctcattctaaaatcctaatagctgtgactttaactaaaagagaaaaaaatgctatctacactgaatacacttttcatgatgataaatattttcccctagcaatgaaatgcaactgaaaattatgactgcatttaactttaattctgttgaatacatgagtccaaaatctcctttctatttcccaaaataaatataagcaatgatatagtttggttgtgtctctacgtaaaatcttaccttgaattgtaatcctcataatccccacgtcaaggatgggaccaggtggaggtaattggatcatgggggcgggttcctccacgctgttctcgtgatactgagtgagtctcgcgagatctgatggttttataagcatctggcatttccccagctcgcactcattcttctggtgtcctgtggagaggtgtcttctgccacgattgtaagtttcctgcggtctccccagccatgcggaaccatgagtcaattcaacctcttttctttataaattacccagtctcgggtatttcttcatagcagtgtgagaacggactaatacaagcaatttgttctgatctcagctgatgataatacagccatgggcggcttgtcaggcctctgcaccttagtagcacatgtagcttcgtttggttttgatttctttctctcttcctctctttctctccattataggagcaatgggtaaccaaatgagtgttccccaaagagttgaagaccaagagaatgaaccagaagcagagacttaccaggtagtgtagtaaccattacaggggcatcagcagaaaaaaaaaaaaaaaaaaaagaacttcctgtatttgacaagtgtgttgactgaagtcctggctgctgattgattgtgtctgtgtgtgcaagacagtggagcgaggataacctaaaaggtgtcagaatcagcatattaaattcgtgctccagccctgacttgacaaatgcccatttgagcctggggtcccctccgtgcgacgggtcagagcttcctgtgagtgtggggtcccctgagctgaggcaccatggtgtgctctcataataactggagtccactcttggagtgagttattttggttctccaaggcatgatagaaaactggggagtttctagaaacacagcctttaagttaagtttaattttttgtgagacacccttgtatcttagaggttcttccttgagttcttctgattttcccccgaagatttgtctcacaatgccacgtgctctgtttcaggacaacgcgtctgctctgaacggggttccagtggtggtgtcgacccacacagttcagcacttagaggaaggtcagtgctactctgggaagggcatctaccctctcgtggggaaggggggtctgcagatgctgtttacggtgaaaaaaaaaaaaaaatgaaagggtcgaagccgcaggctcagtttgaaaatacttgcgtttgttccttgggctaccatgccctggtggcttaagcaacagaaatgtattgtctcacagtgctgaaggccaaaagttcaaaataaagttgtcagcagaattggttccttctgcgggtcatcagggagaacgtgttccacgcccctctcattggcttgtagatatggccatctcctccctgcatcttcatgtcatcttccctctatgcatgtctaaatttccccttcatcatatggaagcagtcatgttggattagggcccaccctaataacctcatcttaacttgatcatctgcaaagatcctgtttccaaataaggtcacattcacagggggttaggacttcagcatctttgggggcaatatgattcagccataacaacagatctcttctgagtgtgtgtgacagctggaggagactgaggagttacagcagataagataaaagcaatagagtgaaaacatgaagcttggcagacctaggttgcaatctctgccctgcagattactggctgtgtgacctggaacaaggcatctgcttttctcagcctcagttttctcatctgtaaaatggggataaaagtacctacctcacagaattgctatcaggattaaaggaggttgtttattaaacatttaacatagtctccagcgatatttcatatattccttttccccaaatgtgcacagcctctgccattatcagcacttaggaattcctcagaagctgataaattataaaagacaacagaattgtgtccacatgagggcagtgttaaaactgaggcatatacttacctatttgactttatcctggagtataagactgtatattcaatgcttccagggtggtcaggctctactatgtgacggatacatataaattatgtaagaagaggtagtatagcccagtagttgagggtaagaattctgcaatcagattgctagctttgccacgtactagctgtgtgaccttgagcaagttacataacctctctgaacctctggctcctcatctgtacagtgggaataatgacagtacttatagcataagcatctgatataatgaaagcacatattacagtgcctgactgataataagtgctcctatcattatcatattatggttatggttgttttctttcacatgtaagattctgggcttcagtttcctttcctgagtaatgaaggaggtatattacagcattggttccaaagcttttagaatttcctagggaatgtattaaaaattccatgccctagtctcatcccgtagctgctattcagaataccctaaagttggggactgagaacctgaactattgggggctctgtagaaggttcttttaaaaaaaaatcatagctttagggtacaagtggtttttggttacatggatgtgattatatagtggcaaagtctgggcttttaatgtacctgtcacctgagtagtatacattgtacccaataagtaactttcaccctcattccactcccaccctcccttctttggagtctccaatatccattatgctaccctacgccccggtatacacatggcttagctcccactttcaagtgagaacatgcagtatttggtttctgtccttaagttgcttcacttaggataatggcctccagttccatccacgttgctgcaaaagacattattttgttatttttatggttgagtagtattccatggtgtgtgtgtgtgtgtgtatgtgtatatatatattcaacacatccaccaccatacatagctacttttttgtttttgttgtagggtgtggtgaggacccttacaatctactcttagcaaatttcaagtaagcaaaacagtattattaacttatatttaccatgcaacttattcatcttatgagtgaaagtatgtaccttttgaccaaaattttccctggaccttagcccctgataatcaccattttactctctgcttctatgaattcaacttttttagattccacataaaagtgagatcatatagtatttgtctttctgtgtctagcttatttcacttatcctaaagtcctccaggttcatccatgttgtttcaaatgccaatatttccttcttttgtatgattgaataactattctgttgtgtgtgtgtatttacacacatgtatatgtatatgtgtgtgtccatatatatatttcctttttccattcatccactgatggacacataggtcattcccatatcttggctattgtgaataatgctgcaatgaacctggggctacagctaccactttgagacccttctttcacttttttagatatacccagaagtggattgctgaatcatatggtagttgatatggttttgctctgtgtccccacccaaatctcatttttaattgtactcccataattcccatgtgttgtgggagggacccagtgggagataattttaatcatgggggcagtttcccccatactgttttcatggtagtgaataagtctcatgagatctgatggttttatcggaggtttccacttttgcatcatcctcattttctcttgccaccaccatgtaagaagtacctttcacctcccgccatgattctgaggcctccccagccatatggatctgtaagtccaattcaacctctttttcttcctagtctcagatatgtctttatcagcagtgtgaaaaacagactaatatagtagttttattttttaactttcttaggaacttccatactatttcccataatgactacgccagtttacattctcattttgtcccaatttttaatcgggttgtttgttttcaattatcttcttatgtttaatatggagtgcaagggcaaggaatgaatagggaaaaattgttgggattgagaaagcctcttctctatccttctctccatcctccatctcactttctcttttctttcctctctcacctgtaatatatttatgttttttatatattatgcatgtgtgttaacatatatgagatacacatatgcataggtatatctcatatatgtgtatgtctcacatacatgtatgcacatatttgagatatacatatatatatgcatatttcatatatatgtatgtatattacaaagatgttcccaaaaggagggaaataggtttctcttgaaacgtaggacaacagtctgagacagcagttgccgtgtgaacacctgcacatgacgagggaaaagaaacacacatttctgagtcatgggttatttgtacctcgccctcacacctggcagtcttgctgtcaacatcctcagctactgctggagagtttgtaaagagtcccagttaatcccgaggtagcaattttgcctgttattcattgacatcttcaacctgtgaaacttgctttagagtgattaccccttttaagcttattgttgtcctcatgcagttttcctaaggttattagctaagttataattttcagtgcagttttaaggggtataaaagtgaaattctgggtgaccctttcttgtccttcagagagaattatttgaccatgtcttttgatgcacatttctattgatctctattggtgtatacatatatgtatagaggtatagaaaagtcattggaaaaatatgtaaatagaaatctagttgactgtttggtttctttttatctatacttttcctacttacaaaaattacaattaaaacaattcattggtgatacggtttggctctgtccccacccaaatctcatcttgaactgtagctcccataatccccacgtgtcatgggagggacccagtaggaggtaattgaatcataggggcatgtttttcccatgctgttctcatgatagtgaataagtctcacgagatttgatggttttataaaagggagttccactgcatatgctctcttgcctgctgccatgtaagacatccctttgctcttccttcgtcatctgccatgattgtgaggtctccccagccatgtggagctgtaagtccattaaacctctttcctttataaattacccagtctcaggtatgtctttattagtagcctgagaacagactaataccattggcatccaataatatttcctatgaaggcttatttagaagcagcaatggtaccatggctaagcaaacagccaaagaggctggaatgctacattgaatcatggctccaatatgtgagcttgggcaggtttctgagcttctttgttctgtcatctgtaaaatgggaattataataatgataggaccaaagcttctaagttattgtacggtttaaataagttgatactcctaaaactctcagaacagtgtctggcatgtggtaaacacataaggaaagttattctgtcttggatttaatgtcaattgacataaagactgccattgctatttgaagttaactgtattatttctgcctaacatatcttttggaactttaagatcaaaagttaaaactagtctttcctacatcccttatgccttgtaagtcttttatttgtctttcgatacaatgtgagagatatcaatcagggaaaatacctcttttaaactaaaacatgaaattacattctgtatcctcctagaaagaaatgtatcgtgtagagtgctttttcttagtaagagcaaaccaccatgggaatttgatatcaaacaaacattaagtaatacaatccatgtggattggagatctttctcaaaagtttggtattattattcatcttaagtaacaatatattaaaaaatcaaaatgtctcagtttttgcttatgttatatttctagcttaactcaccaattttagatgttatttgagtgtcccgttttggagtaggttgctaatgatgttaaaacaacataccatgtgatttacctgcaatgccactaagacaaacacatttgcttgcaaactttgggtgagaggcttatgtgcttgttctgccaaaatgcaattgtttaaattagtatcctcaatttgtctccatccttttcaaatagttgttttatttgaacccaaaaatatcttgagaattattagagcaaaatatctatcattagaagaacggataatccaattagggtatatccgtacaatggtctcgtaatctgtttgtactgctataacaaaatgccatagatctggtaatttataaaaagtagaaatttttttctcttagttctagaggctgggaagtccaggatcaaagcaccagcaggttcagtgtctggtgagggccctgttctctacttccaagatggcgccttgctgtgcccaccagaggggaggaatgctgtgtcctcagatggcagacacgacagaagggcaggaaagggactaactagttccctcaagtccgtttataaagtctataattccatttatgtggtctttgccctctaaactcaatcacctccttaaggcctcacctcttaatatgatcacatggtaactaagtttcaacatatgaattttgggggacacattcaggctatagcagatggtatactccttagcaataaataagaaggaactactgatcaatgcaacagcatggatgaatctcaacattattatactacgaaaaagaagccagacacaaaaggcaacatactacatgattccacttatataaaattctagaaagggcacaaatgtagtgacagaaagtagatcagtggttgctaggggctggggctggttgagacactcactgcagaggggcatcgagaaactttgcaatgatggagaagctttataccttcatcatggtggaggctacatgactgcatattttgtcaaaatgcactgaattgtgctattaaagttggtggattttattgtatgtgaattatacttcaatcagataaatctgatttttgtaaatgctgttaaggtacaatgaagttttttaaaaatcagcatagttggctgggtgcagtggctcacgcgtgtaatcccagcacttttggaggccgagacaggtggatcacctgaggttgggagtttgagaccagcctggccaacgtggtgaaaccccgtctctactaaaaatacaaaaattagctgggcgtggtgacacacgtctgtaatcccagctactctggaggttgaggaaggagaatctcttgaacccagggaggcagaggttgcagtgagccaagatcgtgccacggcactccagcctaggagacagacagagacctcatctcaacaacaacaacaacaacaacaacaacaaacaaaaaaaaaaccagcatagtcaaaagcagctcacatcaactaaagaaaaaaaataaattcaataaagaatggggggaaagatcatttgctatgttagaagggtgtcttctgctcaaccagttcttttgcttcctctggattcatcactgggggcaggaggagtctgcacaaaagaaagtaatgtgatggggaggtgttttgtgaagagatgacatctcttagctattttgtcagcccattcctcccatatactgcccaagagagggagacctcaggagactgtcatctggtacctcttcacctccccccaatacatgtggtatgttaatttattgcatctcattgaatcagacaacttcaagtaggaccacacttcacagttgagcacatcaccctcctgttgcgtacagagatcccctgttttgttcacatgcaaactttggtggattgtgaaggagaaactcaatctcccatggctcagagatcaggcagttagaaaggacagaacatttagtcccacacaccactgtcaggccacacaaaattaatcatcctagaaagagaatatgctgttccatttagtgaaacattaccacggaggtgccacaacccctattaatatgcaacaatcactttcccaccaataagaaaggagaatgacggctgctccttacctttttcactcaaaagctaaaaagagaagagaaagcctaagcctagagattctgggaaggaaatacctaaaaaggctttttaccaccttgagaatatagttgttttctagtttgtttctttgcaaaagacccacctaaagagatagatggccagtattagcataaaaccaagctctgtgagagtgcagctaatgctgatgtgatttagttaacatttgttcttcaataacaaaaacatagttttaaaaggcacatatgttctcaagggggaccccagagtcatcttctcactcaagcagagctgaggtgttggggagggacgcaaggggaggcagagcgtggacggccagggcaaagaaggcaggtgggcaagtgagatgacacgttggcctcgcaggtgacatccaggactagacgaggtaatgcattaagagctaagcgcatcccattcatgaaattgtaatatcactgacgtgtatctgtgtatgtactgtatctgtgctctatacgtaaaaagaatgagttttgttcatcctctcccatagaaccattttcgccctcttgggattaataccatccccactgagagtgcatacactagggagtgcaacttacttatgcaatttcttcatgtatgagaccacagagtattatagctaagagtccagcacaaggcacggtgcccttcctcccatcaaatgctcacatctaatcttcagcacctatgagtatgtgaccttacatggcaaaaggacttggcagatgtgactaaggaatgtgagatgatgatattatcctggattatccaggtggacccagtgtgatcacaagggtcttcatgagagggaggcagaagggttggagtaggaaaaggtgtgattatgggagcagatgtcacaaagagagagaggcttaaagatgctacactgctggactggaagctggagaatggagccacaagccaaggaatgtaggtgacctctggataccagagaaaagaaggaaatagattctcccctacagcttctagaagctgacccatttttgacctacaggcttcagaactgtaatatatttgtgctggggcatttgggataattcattacagcaatcggaaatggaaccatatcctctcaagcattggactctaacagacccaagcataggttttggctctgccactcactagctgtacaaccttggcaaggaagtttattctgagtctcatctgtaaaactggaataatagtatgaactttgtaggggagctctaaaaacagcagctggcacaagataaaagtgctgaaataaaggagtccgggcaaaactaaaagtagaggctattgggatgggtgcagtggctcacgcctaaaatcccagcactctgggaggctgaggtgggaggattgcttgagtccaggagtttgagttcagcctgggcaacatagagaccccatctctatttaaaaaaaaaaaaaaagtagaggctattttcatacttattctttaccattggctttccctgacatatcacctgaccagattttcccacctgcatattatttatgcctaaaacttcatagatctttggagaaataaaaatgcctgatttttggccttctttgattcctttctagcaaatttatgacattagttctcaggcctcactgctaacgtatggcagagactaagacatgccttccctgccaggacacgtcattttccagaaacagaaggaatgtttgacctggataaaaggtttctaaaattagtattttccttttttgctcctagtcattgttcctaaaaagaatagactaattttgcttttcttaaaaaaaagatgtaagtggaatcattttattggattgaaaattctaacttgagaaaagtgctcctgccaataacataatgagtgagaagagaagcatttgccaatatcaatgcctagtcaaagtggaatgggagacctgatgccaaaaagcatagctccctgatgtagtaaaaaatataggcaacagcacttgtctggaagggagcaaatacatgtgttctcctagtgtccactatttccctccaattgatcttattttttatctgtttccaaactcaagtaaaagtccctgagagcaggacgcttgccatcctttcttgttatgagggtcccagagctcagcacaaggcctgagatacactaaagacttagaaatggttgatcaatgaacagtggcatattaagccagtggtagcagaggaataaaataataaggccgaagggcaagttcccagactctgctgcactcagcttcaaggaatgcaaccctggataagtaaatagcacttttaatttgagcaagaagtctggaggtggcagttctaaatttggtacagcagtctgacagcctcatcaaaacaccaagtacatgagccaattgtgtcactcctgctcacaagatggctgtcacagaaccaaacatcacatctctacatcatgggatccaaaagcaggagaggaaaggccaaactttgccaccatttttttttctccttgtattatgcgaggaaggaggatccttccctgaagcctctgccaccatgtaggcatcctcttattggccagagctacatcacatggcccataccagctgcatgggatactgggaatcaagcatctctttgagatgcaagtgaataataataatacatggttggggctggagacgattggctattgggcaggccacaaacagtgtctgccagaggtgattccaaagaattattagaattgagcaaaggaaagtagttcatatcctcactctggcctttcaaaagacattaaggagatctaactcacatcctaaacaccacttttctctctcctcacattgctatatgtctctcactcaagaggctccctatcctcaactctccaccttgaaactctgtgagacaccccatcctcatgaggtaggggaatagggtctggaggcggggaagctaaggacttcctagaactaaatcaagcagaaaacccacaactttctatgctcaactatggatgtaactgcacttcagctatggcaggaaatatcctcttcatttgcatagggtgtacaccaagtaaataactttgtaacttcccttcatcctcttcatttacatagggcatacaccaagtaaccaatgggaaaccactagagggtatttaaaccccagaaatttctgtaaccagcactcttgagccacttgctcaaacctgctcccactctgtggagtgtactttcatttctataaatctgtgctttcattgctttgtgcattttgtccaatttttttgttcaaaacaccaagaacctggacaactctccactggtaacactcacaggcactctcctttcttctttccctccattgcactgtatcaccactgagtctaaagtaataacagagagttctgaacactggctctcccagatggcccaacagctccttgtgcctctgtcttccttgggagtgagcaagagccctggggaaatctcatccttctcaaactcagtgctttttctcaccaaaaagtctagtggagaattcctgttagataaaattatcttccctattgcattattgtggttgatagtctccaaagatgcacacatacaacccaccacgcaataacccatgcttcctggtattcacacccctgtgtagtcccctctgggctggtcctatataaccaacagtatgtagtagaagggatgacacaggactttcaagaagccttttaagaagactcggagcttctgccttgtctcttgcaacactagctctgagaaaggctagacacaatatcagaagttctaccctgagattgccatgctgtgagagagcccaagctagtcacatgaagaagccatgaggcaagagagaggtacccagccagttcccaaatattccagccatcccagtccaggaaccagacctgtgattaaagaagacatcatgggcatttcagctaatagatgccgtatgaggaaggaccataggaaccagcccatagccagaactaaagctccagacatatgtccctgtgtgagccgtcccagccatcttcatcctttcaaggcaccccagctgtggctccagacatcatagagcagaaataagctgatcctatcctctctctgcctgaattctttttttttttttttgagacagagtctcactctgtcacccaggctggagtgcagtggcacgatcttggcttgctgcaacctccacgtcccagatcaagtgattctcctgcctcagcctcttgtatagctgggattacaggcacgtgccaccatgtctggctaatttttgtatttttagtacagactggttttcaccatgttggccaggctggtctggaactccttgacttcaggtgatctgcccatctcagcctcccaaagtgctagaattacaggtatgagccactgcacctggcatctgcctgaattcttttttttttttttttttttgagatggagtctcgcgctgtccaccaggctggagtgcagtggcatgatcttggctcactgcaacctctgccttccagcttcaagtgattctcctgcctcagcctcccaagtagctgggattacaggtgcccgccaccacacccagctaatcttctgtatttttagtacagacggggttccactatgttgggcaggctggtctcaaactcctgacctcgtgatccacccaccttggcctcccaaagtgctgggattacaggcatgagccaccgcacccggccctgaattcttaatgcatggaatcatgacctaataaaatggtggttaagtcaatcattttggggatgcttgttacacagccatagataactgaaataactattagtatgcattttaattctttgtattttatttttacatgcatatatacttacatacataccaattaacatatatgaataaatgcaatcatattttctgttattgttgttttggtgaaacctgtctttttctttttcttattggcttcttcctcatctcacatcttccctaccccctccaaggacacccaagctaacaacctaatatttcttctttcatatttttctctttgttctatactttgtaaaagacaaatctgagacacaataaaatttcaaagagtgtatctgaatagaggcaattcattaatttgagaaaagaaaaccaaaagggaattagtgttttgatgacaaagcattacatgccagaattaagggaaaatgcagaggcataatataaaatgtgtttgatgtgttacaattacacagttgccttatttgatcatctcattggaaggtacccagttatataattttaagtttgttgactgtttctgattggttgagctcaagttctgtttttctttagcataggcatttacaagaaacagttcgagttgttttgcttatgtctgcaaatcaagcaaggtttagctcatttatgtggtctaacaggctttgtccgctcagggattcttcaggtctggtctttattttaatttactttaactagccccatacagacatttcccagcacatccattaatagtgtttgtttttttttaattgtaataatcttccccatctcaactccaaattcaactggtataactttaattcattttttttaaagctacaatgtacttcaaggtatagacatactataattcattcagccattatgctaattttgggcattcagtttttttcttatttttctctgacaatttttacctgggcgtaagttttttgttttgttttgttttttttttttttttgagatgaggtcttgctctgtcacccagctggagtgcaatggcatgatcatcactcactgcagccttgacctccagggctcaaggaatcctcttgcctcagcctcctgtgtagctgggatcacaggcacacaccaccacacctggctaattttttagtttttttgtaaagatgaggtctccctttgttatccaggctggtctcaaactcctgggctcaagtgactgtccctccttggcctcccacattgctgggattagaggcacgagtcacagcactcctctggcataagtatttttaaactcgtaatgtttatccaatattaaaagttatttggaatacacttagaaaatttctttttttctttttttttttgagacagagtctccttccgctgcccaagctggagtgcagtggtatgatctcagctcactgcaacctccgcctcctgggttcaagcgattgtcatgcctcagcctccctagtagctgagattacaggcgcgtgccaccgcatctggctaatttttgtatttttagtagagatggggttgcactgtgttggccaggctggtctcaaactcctgacctcaggtgatctgcccaccttggcctcccaaagtgctgggattataggcatgagccaccgcgcccggccggaaaatttcttcttcacatttttcaaaaataaaacattggcatttctgttttaaatttttaaggacttttttgtacttaccatgacagatactctggacacaacttactgttccatgactcatacagtctgattttaactgtcatgcaactgctgttgagtaatatgcaactttctctttgcctctttggatggagaagaaaacaaggcagcacagttgggctccaaagataaaaacatgggcagggtttcaagatcactcatctctgtcttggaggatagaccaagagagataggacagaccaagagacaacatgaaaaaaacatgaaaagagaaacagcattgagaaataacaacagctgcactcaattcttttcctcaaggtgcattttaaccagatcttgaaatagaataaacacacctacaattctaatcctagagtggacatttttttaaaatcagcttttcatatccttttaccacaccaaaaagaacttaccaacaattttcatttaacaaaaataaaaataatcagcgagatcaaagaaatggtaaggtgcgcttcaagtttctggaagtttatcaataaaagcagcatactgtattagtgggtaggatccattatatgcaaagcataccccaaagagcaaatgtttctgggaacaagaactgaaaaatgtaagcagagcctgcctccttgtgtgggtgcaatagcagtgcccaatagcagtgactcgcagagttgtccctgggccagcagcatcacatcacctgggtaccggttagatgtgcagtttctgtagccggagcccagacctcctgagtcagaaacacccccttccctgggggtggggcccagctatctgttcccacaacccctcccgggtattcttgcactagctcaagtctgaggaccatgtaagaactggctcaaggctctgaatgaaatggagtttgcagggaactggaaagcgtccttgtttatagggctccacacagcttcaaggatggctgccctgggaaaccctgagccaataataagatatttcaataacagcctgattttaggacttttaaatgaaatttcccaattcaaaaaaatataaacactgtgttggccaaaccatcagcagacctcatagttggcaacctccgatagtgtgaggtttatttttttccctacctcaaatccctctaaaaagatggctataaaaaaaatcatcgtcatcatcatcatcatcatcatcatcatcatcaagttatcatagcttcaagcaatgaaacattgaaatcctgtaaccaatttcagctgtgcttgcagatttgtgggctctccaggcatcctgcccgtcacaatgtgcatcccatctgtgttttccacagagagggacagtggtgggatgttaccagtggctggccccctttgcagctttctgtcacgtagtcttaagccagtaagttggctatgtggttaattcatgagtcctcttaaaaatgccttctgagagttacatcagctccaggtgatataaaaagaaaagctggattttctgaatttgccaagcagaggctcagactctgcaacatggagatgtccctaaggccatgacactctcagcaagcagggcccacctggcctatcagcccctccattcaaagctgatgctcattggttagaacctgcctcgctgctgggccagccctaggcaaattgggaaataggtcaagtgttcagtccactttgaatcccacctctcatttctagttccctactttcattttttcttttcattatttcttcatttcttaatggatggggtaggtgcatacacatagcaaacattctgagcgatatacataataagataaggcagagaaaaaatccccaccctaactctgatggctccccaagccccatcccaaatttccttccttagaagtaaatactttacagtttcttatatccagaggtatcccaggcatgtctatttataagttgtctcctcaacctcccgacaccattttttaaaaacaaatggaaacatactgtacgtgctgttgggcacagctttttctttccttactaaaattccttggggaattttaatgcctgtggaatatttcattgtagggacatatgattatttatttttttaaacttttatctaggttcagattacatgtgcaggtttgttataaggtaaactcatgtcatgggggtttgttgtacagattattttttcacccgggtactaagcctagtacccactagttattttttctgatcgacttcctcctcccaccctcaagtaggctcagtgcctgtcattcccctctttgtgtccctgtgtcctcaaggacatatgataatttatttaaccaggtttctactaataagcgtttaggtcatttccagttttttgccacaactacagtagtccagcaaatagttccatacgtaagcctttgtacccctatgcaattttatttctaggataacattttagaagtggaagttagacttacagtgtttgtgaaattttaagtattaatagatattactgagctattttccaaagaagtggccaaattacactcccaccgacgatctatatggctgttcttttttttttttttttttttttgggggagacagagtctcactctgaactctgttgcccaggttagagtgcagtggcacaatctcggctcactgcaacctctgcctcccaggttcaaatgattctcctgccaccgcctcccaagtagctgagattacaggcgcccgccactacgcccagctattttttggtgttttgttttgttttgttttttagcagagacagtgtttcaccatgttggccaggctggtcttgaactccttacctcatgatttgcccacctcggcctcccaaagtgctaggattacaggcgttaagccaccgtacccagccacagctgctctttttttatacgctttccactggggtcatcaattgtctcctttttaaccaatttggcaagggaaagccaagtgtcataattttattgtgcttttattttactatttatgaggccaaacatcttttcttctgcttaaaagctggctgcatgtcttttcctgtgaactcttcactcctatttgttgtctgtttcctacccccaccccttggtgctgtgttgctgtttatttatctaattcttctttttacaaattgaggtacaattcacctaccataaaattcaccttttagagtgacaattccgtgattttaaggatatttgcaccatgtgtgcaatcgttccacgtctaattccagaacatcgtcattactccaaaacaaaactccctaccctttagcgctgagttttttccctattcccagccactggcaaccactaatctgttttctgcctctatggatttgcctattctagacactttatataaatggaatcatacaatattttgctttttgtgtctggcgtctttcacttagtaccatgcttccaagtataaagcatgatataacatggatcggtgctttgtttcttcttatggctgattaatactctattatatgcaaatgctagatttcctttttccaattgatggatatttgggttgtttccacttttcagctattatgaaaatgctgctatggacatttgtgtacaagtttttgtgtggccatatgttttcattttcttgcttacctaggaatggaattgctgggtcttagggtaactccatgtttaacttttccaggaactgttaaactgctttccaaagcagctgcaccatgtcacattcctaccagcaatgcatgagcattccgattttttcacatcttccctaccactggttattgtctctctgattatggccatcctcgtgggtgtgaagacgtatcatgctgtggctttgactgcacttccctaatgagatgacattaggcatctttttatgagttccttggccattagtatatctgctccaaagaaaacactatcatcctgatttggctgctttgctgcaccctgagcctcttgtctctgtttcctggctaatttttccagagtctcaaagtaataatagtcaccctttggcaatcttctatgtgtcctgaactcaacctgccccacaaccgtatctccacagctgacccgtggtgtcctaacaactgaagccactgatagaataataggccacctcccctggtaagctgcttaccacttaaaaggtgcttgagacactcattgctgctggaaatgtgaatctgtagagcctttttaagaaaataatatggcagtgtctgtttttcaaaactaaatgcatattgatttgagggtaacacttctacatctgtgcctctattctatagaaatatagcaccagtttaggatttttgaacacgaaagtttattccactatagtggaaatggaaaaaacaatgtggaaactaccaggatattcattgattaggcaatggtttaaatatcttttggtatatccatactgaggaatattatgcagctattttagaagataagatagctttggagctattgactgtgaagaccaactataatgtacaaaagtcatcagaaaatatgtctaatgtgatccaatttctataaaaacaacaaggacagatacagtccctgtatatgtgtatctgggatgcttatacgtgtttgtgtgagtataaacaaagttcaatatgccacatcaggttgcagatgttatttatctggcaatgagggtggaggatagagacaggaaaaacaaagggttcagagagattaattattttggttgtaaacacgggttaaatgtacattattatcagatttataaaaaaaatcaaatgaaacatctgatttgtctttaaatgaaaatatatgctcatgttggagcaaaggctggttttgcatttgaatgagctttgcatattccagagttttgtagcacatgaatgacaggaaatatatgattaaagagaagagtggaaatcttgagtgtcactgtcagtcttgccccacagtatctgatcatcactgttgcttttagaggatgttttctgaagagcatgggggtagtagtacctttgcctacattcctttggaatccagcatttccatcactaaatgtccagacatgttgtataaagctgatagtcaagaattctaccatgatgttccaaaatcccatccttttcttttatttatgctagaatttcttggcaaagacattctggctttttaatgtacagatgaaaagcatgaaatgcgatcattcagtgaaagtttcaaatctaatctaacgtcttcctccaagtcataagtatctgccacgtgtaccctgactttacgacctttaaaacaacaaatgcatttgcacaacatagaaagccgcagttgtttgaagtgtcatttgactcttgcagcatgaccattgaagggtcatttttgcataattttttgaggtcttcataaagttttgagttttcccaaaggcctaacataatcttttgatattctaatataactcttttgaagaacttactgtgttgtgttgtccacttttccttcttcggtgatctgtgttaactttgccagatccttgtccaaccacggtcatgtgtgtgatctgagcagctcaccaatgttacaagactctataaacccctgcatcttttgcaagatgtacaatttccctttgcaattagtgtgtatatgtccactttatcctgaatcctgacagatcaggatattgatgcataggacggtgttgcttgcataggaagagatgattcggcggtgaataatgttcatacatggacactttgtaaataaaattataatgatagttcctgctttcccctttaaactgaaagcttggaggatttggataatgtattgtcagaaaaagaaatttcatccagcacaacattagtctcttctcagagactcagtttcccaacctgttcattggtgtgccctactacagttacaatcatggtcctttgtggagtgtttgctaggctgtgccccaagctctgtgcttgctgcttcacccatgtttcctggcttaatcctagtgtctagcactatgggaactggaatccagctgtaagcagagcagaccaagtccgggtccacttggggcttacaggtcgtggagaggaaacaagtgaagaagaaattaatgggatcatttcagagagtgatgaatcctctgtggagtctagagaataaacaggagtaagcaggaggggttacttcagatggaggagtcagggaaggcctgacataacctaagtcttgaatgataagaaggtaaccataggaagatcttagcgaaaatatttccagattgaaagaataactagtggtgagggctgcaggtggaaacatgttggtatgttgagaggtgtgaggaaaaacatagtacgagctgaagttctggagggtgtggcccatagtagagagtttggattttgttttaattttgtgaggcccttctttggatggttttatgcaaatgaatgacataacctaatttttatttaaaaccaaaaatatatagatatcaatgtttcccagatgtgagaaaacagggtttttttccccctcttgtacatagttttttcttgggtatccactaattctattaactaaactttgtctactttgttcatcttccctcccttctatttcttctttctcttctgttcctgctttggttaccacatgttgttgggagtttgaactttggaatcaggcaaatgtgggttcaaatactaaatctaccagtcattagctggacaacattagaaaactgacttgacttttcagagcctcagtttcacgacctgtaaaatgggagtgatgatagtacctaacttgtagatttgctgttatacttaaataaaatgtttcttgttatagacatttatccaaataaataaataataaataaacaaatgtcatacataaataaaatgcctcttgttacacacatttatcctaatgctgggaaacagtcaatgaatgttagctattgtttttacagcttgatgtcgttaggctttttgtccccacccaaatctcatctggaatttaatccccataatccccacgtgtcaagggagagaccaggtggaggtgattggatcatggggacagtttcctccatgctgttctcataaaagtaagtgagttctcacaagacctgatggtttcataaggagctcttccctgttcatttggcacttctttctgctgccttgtgaagaaaggtccttgctccccctttgacttccaccatgattgtaagtttcctgaggccttccctgccatgctgaactgtgagtcaattaaacctctttcctttataaatcacccagtcttgggcagctctttatagcagtatggaaatagactaatacacagctgtagcaagtgaaagttttagctttggcacatgaaaaaaaaaagataattcttcctcagaagttttgaatattgtaatacaaacgtgtgtgtgtgcatgtatgtttaaatatataattagaactctgatgaagcagcttgttttgacgagaatatttggtactttgaaaatgataaacatttctgaaacttgcctggcccagatacttatgtttcttaagataaattgatttatatcactactgtttttaaaagtctttctagaaaactcaagtttgtaaattaaactattggaataattcctttccttatggcttacatttaaaaatacaaaatggtaattatattaataacatattagtataacaaaaataactactgtttaccgaataccaatcatctaccagcctgtggtaagcactgtatgggcaatatttcatttaatcctcagaattaccctctgaaggaggcactgttattttcatgccaatttgtaagaaaactgaggcacagagacaggaaataacttacccgggttatccatttaaagagtgagcagttaagagtcaaagccaggttcctgtgatccacaatccaagttcttaacaattacacgaagatggcactggaaataaggttttaatcacatatacagataaaatgactttctttaaaaaaacatgcagcacaaaatatttttctgcactaagaaaatcaaaattttcaactctaccttctaaatattttggagctgctactgtcattcttgatttctttttaattttccttaaattctttgacttttttaaaaatgaaaagtaacatctctttggtatgtcatctttttgcatttttttaacttttattttaagttcaggggtacacgggcaggtttgttatataggtaaatttgtgtcatgggggtttgttgtcacccaggtatcaagcctgggtgatgaaataggtattattaatacctgggtgatgaaataatatctattaattatttttcctgatcctctccctcctcccaccttccaccctccaataggccccagtgtgtgttgttccccctgtgtggccatgtgttctcatcatttagctcccatttataagtgagaacatgtagtatttgattttctttttcggcaatactttgctaaggataatggccttcagctccattcatgttcctgcaaaggacatgatctcgttctttttatggctgcatagtattccatggtgtatatgtaccacattttctttatccaggctatcattggtgggtatttaggttgattccatgtttttgctattgtgaatagtgctgcaatgaacatacacatgcatgtatctttataaaagaatgatttctatttttcgggtatgtacccagtaatggaattgctgggtggaatggtatttctatctttaggtctttgaggaattgccacactgtcttccacaatggttgaactaatttacactcccaccaacagtgtataagcattcctttctctccactacctcaccagcatcttattttttgactttttaataatatcattctgactggtattagatggtatctcattgtggtttttgatttgcatttctctgatgattagtaatattgagctttttttcatatgcttgttgactacctgtatgtcttcttttttttttttttttttttgagacggagtctcactctgtcgcccaggctggagtgcagtgatgtggtctcggctcagtgcaagctctgtctcccgggttcacaccattctcctgcctcagcctctccaagtagctgggactacaggcgcctgccaccacacccggctaattttttgtatttttagtagagacggggtttcaccgtgttctcgatctcctgacctcatgatccgccctcctcggccttccaaagtgctgggattacaagcgtgagccaccaagcccggccgatttttgtatatgttgtaaggaaggggtccagctttaatcttctgtgtacagctagccggttatcccagcactttttattgaataggaaatcttttccccattgcatgtttttgtcaggtttgtcaaagattagatagttgtaggtgtgtggtcttatttccgggttctctattctgttccattggtctatgtgtctgtttttgtaccagtagtatgctgttttggttactgtagccttgtagtatagtttgaagtcaggtagcatgatgccttcagctttatgctttttgcttaggattgccttagcaattcaggctcttttctgggttctatatgaattttaaaatagttttctctggttctgtgaagaatctcaacagtagtttaataggtatagcattgaatctataaattgctctgggcaatatggccattttaatgatattgattcttcctatcaatgaacatggaatgtttttccatttgtttgtgtcatctctaatttctttgagcgctggttcattattctccttgtagagatctttcacctccctaattagctgttttcctaggtattttactctttttgtggcgattgtgagtgggagtgcattcctggtttggctcctggcttgactgttgttggtgcatggaaatgccagtaatttttgcacatttattttgtatcctgagactttgctgaagttgtttatcagcttaagaagctttggggctgagactatggggttttctagatataatgtcatgtaatctgcaaacaaggatagtttgacttcctctcttcctatttggatgcgctttatttatttctcttgcccgattgccctggccaagacttccaatactatgttgaataggagtggtgagagagatcatccttgtcttatgccagtcttcaaagaaaatgcttccagcttttgcccattcagtatgatcttagctgtgggtttgtcatacatggctcttattattttgaggtatgttccttcaatacctagtttattgagagtttttaacataaatggatgtctaattttattgaaagccttttctgcatctgttgagataatcatgtagtttttgtctttagttctgtttatgtgatgagtcacatttattgatttgtatatgttgaaccaacttgcattctacttgatcatggtggataagctttttggtgtgctgctggattcagtttgccagtattttattgaggatttttgcattgaagttcatcaaggatattggcctgaagcttttcttgttgtatatctgccaggttttgatatcaggatgatgctggcctcatcaaatgagttaggaaggactccctcctactcaactttttggaataatttcagtaggaactgtaccagctcttctttgtacaactggtagaacttacctgtgaatccatctagtactgggtttttttatggttggtagtctatgtattacttcctcaattttagggctcattattggtctgttcagggattcaatttcttcctggtacagtcttagaagggtgtatatgtccagaagtttatccacttcttctagattttctagtttatgtgcatagagatgttcataatattctctgatggttgtttgtacttctgtggggtcagtggtaatatcccccttgtcgtttctgattgtgtttatttgaatcttttctattttcttgtttattactctagctaatggtctattttattaatttgttcaaaaaaaaaacagctcctgaattcactgatcttttgaatggtttttcatgtctcaatctccttcagttcagctctaattttggttatttcttgtcttctgctagctttcaggtttttctgctctcagttctctagttcctgtagttgtgaggttagattgttaacgtgagctctttctaactttttgatgtgggatttagtgctataaatttccctcttaacactgccttagctgtgtcccaaagattctggtatgttgtatctttgttctcattagttcaaaaaacttcttgatttctgccttaattttattatttacccaaaagtcattcaggagcaggtcattcaattaccatgtaattgtatggtttcaagtaggacagtcctgtagatatctatcagggccatttgatttagtgctgagttagatcttgaatatctttgttaatttcctgtctcaatgatctgtctaatattgtcatggggtattaaagtctcccactactattgtgtgggagtctaagtctgtttgaaggtctccataaacttgctttatgaatctgggtgttcctgtgtttggtgcatatatacttaggatagttagatcttcttgtttaatttaacactttatccttatgcaatgcccatatttttttcttttaacctttgttggtttaaagtctgttttgacggcaactaggattgcaacccctgttttattctgttttctatttgcttggtagatttttccccatccctttatcttgaacctatgtgtgtcactgcataggagatgggtctcttgaagacagtataccaatggttcttggttctttatccagcctgccactttatgtcttttaatgggatcatttagtccatttacatttaaggttagtgttgctatgtgtcgatttgataccgtcatcatgatgttggctggttattttgcagacttgttatgtagttgctttacaatgtcactggtctgtgtacttcagtgtgttttgtagtgtctggtaatggtctttccatatttagtgcttcctttaggaactgttgcaaggaaggtctaatggtcacaaattcccttagcatttgcttgtctgaaaatgatcttatttctcttttgcttatgaagcttagtttagtcagatataaaattctgggttggaattctttttgtttaagaatgttgaatattggtcctcaatctcttctggcttgtagggttaccagtgagaggtccactgtaagtctgtgcttccctttttaggtgaccgggcctttcactctagttgcctttagcattttttcttacatttcaactttggagaatctgatgatgatgtcttggggaagatctttttgtggagtatcttactggggttctctgcatttcctgaatttgaatgttggcccctctagctaggttggggaagttttcagggatgaactcctgaaatatgtttttcaggttgattccattccctccatctctttcagacaccccaatcaatcatagatttggtaggcttgattgctgtgtatttacaagtgaaacagggactgaccaattccctggaattctctcaaagtcactgagtatgtattcaatttcaactggcgtaagttggggaagagtgatttattggcttatgtaatgctaaagttcagcttcaggcacagctggatctaaatgtttaaatgacatgattgggtatctgcttcctggatttccaggttctactttcatttgtgctgattctcaagtgtacctcctattggtttgcaactcttttttaataggagtatcaaaagttacaggacttatttttattagtctatcttatgtcaggtgcccacctaggaggtgagcatctgagcaaaggaaatagaagccccaggtgatggacttgggtatgtacccacctaaatttggagagcagagcttcagttgcatggaacgtatcaccgaagaactctaagttcttagaaattgtcaaaaacactttacccattctctgatatcaaaagctactgtttggatttgctataatcactaaatgcactgaagtctagtccagatacctggatgtaaggaatttattctttttcaaagcaacatattggcactttaaaataaaaaaggttgtccatggaaagtactttgtgttttttgaagactttttctctggctataacactcttacttaccactagctcctttgctttccagccagtgggtaaggaagagaggaattaaactgaaagatataagttggtgctcttggcattttgaaaagcccttccctgttttgaatcttagcatttccctttttgtcaaccataccctcttctcctggcatggaccattcccacaattcatttatattcactctgacacttcaacagccttacttgctaactttacaccctgatgcatccatctatcacttacttattctccctctttttttcttctttagtataatattttctatcattatgaattcctgaatcacagaaaaaaaggttaagaagagctagaagatcaatatgctggcagggtgattttcttcaggttcaggtttatgagaaacccctaacattcatccctgggcttgccccagaccatttcttcactgtgcctcaatgcttaatccagctcactctccccccttttttgtttgttgtttagtctagacactgcgagacactagagttgggcaaaaacaattgctaatggatgcatgtgtgtgtatgtgtgtgtgtatgtatttctcactacatattaatgagcagtatgaatagatcaaagaaatctcaattcttccctttatttttctgtcttcctgcaaacagatattaagaagtgtctgactacagatagagcaagcaaaatgcaatgttgtcaaaggcatgagagaaacctgaaaagttatcacagtatctgtcaattactaagcacttattatggaaaaggcgttgtgccagatcctttgcatgacttttcttctttaagcattacaacaaccctgcagtaggactaccaatattcccattttacaaatgaagagattcaaagatctttagtgatttactccatatcacacagcttatcagtagagaatcttgatctttaactgggatcccaacattcttggtgttctttttttcctgaatatttcactgatttatagtagggtcctagaaaagaaggaccttttatagttaatttaggtcaaggtagaggtcaaaggagaaagggtggatgttggaaacagtgcccttgcctggaggggttggagcctgtatccacacacacagtcttgaccagataaccctacacctttaattccacactggcctgaggtctaatttgccttcttgtgtggatatctgctcttccagcctttcaaagagaaattttctgagtactgtattttaaaaatcttcccatattcttaacagtctatgctaatacaagtccctggtaagacagagagcgcatgaacttagaagtcagatttctgcctgaagccagactctgctgcttactagcttactgggcagccaggggagggtgtactgacctctctgactgtcagttttctcactcatgaataatgataactaatgtttgtgatatttattaagcacttaatatattccaggtgctattgtacttgctttaaaactattaactcatgtaatcttcctaacaaaattacgagatttattatctgtctccttttaccagaaagttgaggcacagaaaattagataatctggattcaaaaagacatttcagctcagtgcctctcaaacgtaagagattttgtcctccaggggacatttagcaatgcctagagatatttttggttgccatgactgggaaatgtgaccggcgtctagtgggcagaggccaggatgctgctaatcagcctatgaggcacgggatgagcctccctaacaaagaataatctggcttcaaatgtgagtagtgctgaggttgagaaaccttgttctagctccagaacccaagctcctaactgctgtactgcctcccagttgacatcatgacaatatgctgctcacggagttcttacacagataaaagaagattaattaacattgaatatcactcattccacacctggcagctagtgactttccattaagtagctttccctcctcaccaaccttgccttctcctctcccaagaaaagcagggtccaaggagatgtagagagctaacttctgcctttcagaatgaccagagaacaacacagttccagtatgcagtatggcttttgtataaaaaatgtctggagtccattattagtgcctgaatttcccggcttggctgaataaccactgtttatgtttgtgtttacagtcgacttgggaataagtgtcaagacggataatgtggccacttcttcccccgagacaacggagataagtgctgttgcggatgccaacggaaagaatcttgggaaagaggccaaacccgaggcaccagctgctaaatctcgttttttcttgatgctctctcggcctgtaccaggacgtaccggagaccaagccgcagattcatcccttggatcagtgaagcttgatgtcagctccaataaagctccagcgaacaaagacccaagtgagagctggacacttccggtggcagctggaccggggcaggacacagataaaaccccagggcacgccccggcccaagacaaggtcctctctgccgccagggatcccacgcttctcccacctgagacagggggagcaggaggagaagctccctccaagcccaaggactccagcttttttgacaaattcttcaagctggacaagggacaggaaaaggtgccaggtgacagccaacaggaagccaagagggcagagcatcaagacaaggtggatgaggttcctggcttatcagggcagtccgatgatgtccctgcagggaaggtaagtgtgccaaggtgtatccacttggttctgaatgcatgctcgggggcgctaatgggataagaccactgcacatatgcagtcaccctgggcctaggcaaggtggcaagctgttgacccctctagaacaaatagcacattgcagcagagtgtcatcctgatgtttctctgggtagaaacttctgtgtgaagaacaataacagctgtggcatctgttttatgtaaaagaaaagaggaggtgagttacatgcagatgaatttgtccatccatttttcaaaggcggaagtagacaggttgcgtttacgatcagtggattctggaggaaaaggcattagtggaataaaaatgattcctaaaagatgttacctagtctctgtagtttgttgacatgcagagttttgttggaacacatttcgtcccttactgttaatagcctgaattgatatttaaccatcttttgctctaaggtgtgtgtttgaataaggagattttacagctctgggcagactcttttatgtagtaattcttttccaacaagtaggagtaataaacctttgtaaaaactaggggttttgggttttttttttgttttttggggggtttttttgtgttggttttcaaagaaggtatcctggaatcagttgctttttttcctgagcgaagaaaggcaagctctttttgacactaaaaagagcatttgcttttaaccttgagagagcctgtttgtattcaaggcaggaaaagaactccttaaaagaagaaggaagtaaaacttgatacattataggtttagggcatgcatttccttggttaacagactttttaaataacaatatttttcaaaacttgggaataaagttaagtgccactagcagacttcagagccaggaaaaaattggatgagctccaaatatatttgtcttaatacaatgcaactttgcacttccgaagtgctaataattacacttgctgtcatttattgaaaatgttcaatgtgccaggctctactctgagcactgtacgtaaattattttccttaatgaaaataagtatcacgttaatctatggttttaatgcatccagggtgctacgaagaattacattatgaaggctgggcaccgctgaacactctggagagttaaaattgggaaaagataatagtcatcatgtgttttaggctcttactgtcagcattcttgtgttttctatacattttgattcaaagagcttatttccaacatttctttcagagtttaaacattttcccttcaaacacccactttccaaaattcaccagttcaagaagccggttgaataactttccgtataatttaaaataagtctccaaatgcaccaggcatctgctctttactgagtgtgacactgtactaggaacaggtgaggcacagggaccacagtgaagggcgagacacagagtctcggccctggtggagtttgctgtccagtgagagaagtgaataaataaacctgcaattgcaatgcaagatgccaagtgctgtgctgggggagcagagtgtgggggagatgccagatgccaggagaactgggctccatggcccagggaacattccagcaaatgcatgaaccaggacctgaaagttacgtgcccagaggcggtaaactagtcgtcaatattcctgcatatgggagaaactgtttactacttgcgcctgagtggagaaaccattctcattattggtcataggcttctaaggccattttgaggttgtgattttttaacagtcatgtgtttgttttgcttgggcatccaaagcctatccattggctcagttaggagaagattgagttatttatgggaagacaatgaaggaatgtgttttactcatctttggacaggtgtccggtgactcatccaaatccccatcttaatcaagtaaaccagttcagcatagaatagccagccctccaatgtactcagccataaaacctcgacacactcaatctatttctagtctaagaaaagtgaggaaaagttttggagttgtgatttattaactcagctttctttattgaaaaagaactcttaggggtagaacctcaatttgagtggaatgtgttccaaaatgagatttgagtcagaaaatgggagcttgtgttaggaacatggcaggtatctaatatagcaaagcccttgtgtaatattttcaagttataatgatctctcagaagacccaagaattgtaactgtcttcctttctgaataagtgaattcactccctcagattcaccagtgaagtctgcatctgattttgttacatgacaaatttccatttttttcagtgatattgaaatttgaaatactgagtgcccactttgtactatgtacatgagaaacacagaaaagttatgaaatagccatttctccctcagcctgtgaacttatggatattcagatgcatatgcctgcaaaggtttttaacaacaacaacaaaacagccttctgattgtcaaggtttcttttctgactcccggctgcatagttctgtatttagggggaaaaaagcaattgttctataaatgtaatgggacaatccaaccctcagaaagtaacatgaataaaacttctcaatcagtggctttcttggtgggagtaccacattgtacatggctggatgtcagtgtattgattcagaattcttagggtgaattatgccttgggctcagccgcatctactgcctccctccagcagcccttccccccatttttatggcttgctccctgctggattggaattccagccacaagcccacagagctgtgaattgggagaaagatgccaccatttcatcctgggggaaacatacaaatcttctgtgttttcagaacgacaatcttatttttgtgccttataaaactacattcagggcaaagcataattaaaacaaggcaagaattcatgaacaaatgaagcgtttactacataggccaaagaaaagataaattatatgcctgaaaggtttcactgagctgtgattcatacaaaccaatgtgttggcagggatgaggtttttttcctctccccacaacaactgaaccagagctgtaagatatgcatttaaaagattcaacacacacacacacaaaatcacataatgcaaacttgacctttattggttaaaaataaaacccaccacatttctgttatcaacacagtacttccagagttgtgtttgtgttgagtgggggtgtggggcgcataaagtgttgccatgcagagtttcataagatgaagaatgtcttttttcttttaaaagtgtaattaaatcctgcaatcgttactttcgcactaaccttgtgcaaggcatttgaaaaataaatcatgtttctcgtctgtcaaggagtgtataatctagtaagagacatagtattttaagagacattgtgataagtgcatcggtcctcagattggctcaggctactaataataagaacaatattctgtgttttcacttctcttcttttctctcttgaacacactccattcaggctcttgtcacagccaccatgatgtttcaaattccctaccatcaccctggctgccaaatcctataggtctctatctttgtcctagtaggtctgacctgcaagttgaatccgacacagtgactgagtgggccacaccttgctgtttgaaacaacatccttccacctccctggtactcttccatcatctcctttgctggatctcaccctctaaatgttggacttccccagggttcacttcttggctatctctaactacgcttatttccttgaaggtttccctcagtcccaaaggtttaaatactgctatgggttgacaagttccaaatttacatctctagccgggatccatccctgaagtccagacgtgagtctcagctgcctcctcttccacatgtctacttgaatttctacatccccatttggctgctcactgagtatctcaaccctaatgtgtccagaatggaactcttcattcatcgcctaacaatgacaaaaacaaaatgcccaccagtttaattcacggggttttccatctcagtgaatgacaagttcatcctgtctctactgtttagtggtagaattggaattaaagaactaaggtctccagagtcctttcctacatggtatttagtagtgaattaaacataagcatcatagtcaagtagcctaggtttcctctctacctctgtcacctactggctgtgtgatcttgggcaagctacttcacctcctgagcctcagtttcctcatctgtaaaatggggataataatagtatctagcacattctcacattgttcacacttttagaagttaaatgagataggccatataaagtacttagcacaaattgcattttgaaagaagaaaaagagaaattagctattaccagtattatgggttttctccctgtcttctacttcacattttacttttattttttgcctttcccttccatagtcctcaacccaaactcacagagatagcacagttgactctaatttaagagttgtataaccaaaggcacaagtcctaacttgggtgagaaaggtataaaagttgtaaaattatttttgaaacaatagaaatgttagtgtccatgcccataagcctcagtttctttgtctgacatttaagggtttccacaatgtttcctctgcctattttccaactgcattttccacccttcccttaaatttctccagtcaatatggccaacacctgacctgtgcaaacgccatctgtctcctggtattttctctgcctatgtccctttctctctctgtttatcaaaaattgacttgatattcagtgccaggttctccatgaagctaaccagatatctccactcttggatgatttcggacagcatgaatccctctcgcattttaagtcaaattctgtgattaaatcattttgtagaaatcagctcattgagccatcaaatcttaccagggaattcctgtattttcaccattttacagatgaagaagtcaacagttcagagaaagcatatcactcctgacacacagctaaaaggtggcacagccaaaattgtccatctccaaagcccatagtcttaaatagtcaacgtttctatttttgccaattatttgaaacttgttcaatgaagttacaacttgaggcaatgaaattcaaagatgttagcatatgcaaagttgtaaatacccaaaatcccaagtgaaaaataaaaacaaataaaaagaattaccgaatttcaacattagaaggccaagtgaattattaactgttttttattttgtgttgtttctgccttatgtccacaaggccatgccttttcaactggtaaagagaactagccacccaaaagactttgtcagtgcaaagggaaaatccatcttacattatgcaagttttggagtaaacaaggtcctcagctataccactgggattttgatgcatttagcagtaagaaacgcttaatatgagatgtttgcagtggcagaggtgatgtggaagtgttaggagcctgggtgacctaggtatgagtccagactctaccactaaatagctgtgtggttgagttaaatgacaataatagccccattttaaaataattcattatttctaggctgtgcagtaagcattttgcatacattatctgtttttattgttaaaaaaacccaacaaggtaggtatttctattgccattgaacagaggagagaacttggggagaacttaagttacctgcgttaaggtcgcaaagctaattagtggcagaagtggaatcgagatccatctgtcacctaagcctgttatactcaatcatttaaaaacctgtgttttcatccacaaaaggaagctactacctgccctaggggtttttgtaaagttagaagataatataggccatcagtagtagtcatgctaaataaaactgtatattttctaaattgttagaaacttagaaatgagtaattatgaaatagatcaaatggcttttcagagtgatggagtttgaatagtgtatcatttaggggttggtaatatatcatttttactttggctgcaggaaacacacacacacacacacacaacaatcaattaatagtggttcacttaacaaggaggatgtactatttcttgcatgtaaaaagaaccctagaggtaggggagttcaggttggttcaacatcttcacagcccccacaagcccgcctcagtctttctctactggtgtcctccattgttgcttagtccctaggcttagtcccttgtggttttaacatgattccaagtatgcaggagtacctctctttattgtgcttcacagatgctgcatttttacacattaaaggtttgtgacaatcctgcatcaagcaagtctgtcagcaccatttttccaatggcctgtgttcactttgtgtctttgtgtcagcattttttagagataaagtttttgttgtaatttttattttaagttctggggtacaaatgcaggatgtgcaggagcccgggtgacgtgcacgtgtaccccagaacttaaaataaatgtgtgccatggtggtttgctgcacctatcatcccatcacctaggtattaagcccagcatgcattagctatttttcctgatgctctccctcccccaacccccgacaggccccagtgtgtgttgttccccttcctgtgtccatctgttctcattgttcatctcccacttataagtgagaacatgcggtgtttggttctctgttcctgcgttagtttgccaaagataatggcttccagctccatccatatccctgcaaaggacatgatcttgttcctttttatggacacatagtattccattgcagcactattcacaatagcaaagacatggaatcaacccaaatgcccatcaacaatagactgggtaaagaaaatgtggtacatatacaccatgagacaaggtatttttaaattaaagtatgtactttttttttagacgtaatgctattgcacacttaatagactccaggacagtggagaacttttatgtgcactgggaaaccgaaaaatgtgtgtgactctattgtgatattgactctattgcagtgacctggaattggacgtgtaatatttccgatgtatgtgtcataatgtcctataaataagaaaggagtttcctaaaatttatcctcagagccctttggtgaaattgagtcacgtgtctgtgtcaaggtgcaaatagctatcagccagcattttcagtttcttcagtagaaagaaggctcttccagcaaagaggacatgccacagatagaaaccagatttatcttctctacctaacattgtctggaaatcattaagtgaatggagcaagtagaagctgctacagtatccacctatggtaattcatctgagtgtatccattacattagttttctaatttaactgtgaccccatagtaagaactagattttacttgagctgatatacatgcgcatacatgaaacaaagaattcatgaagtaatactattcttgcagcatgtaacacctgcagggattttgtattcttttctattctgtttgatttgtttactgctggttttgacccactaccttatttttaaatctgctaatgatcacagtctgaaatttggagaacgctgttctgttatctgaccacttcgacacattgagacagttatcttaagagacgtgaccattttttatgcaactgagtattcccaatgcctagcacaatggctggcacatgttggcatccaataatgtttgttaaatgaacctgacaagaataagggtggtacacgtcatggttcaacttttcagactgttaggatgtattattgcaacgtcattatctgctctgcctaacacaagttgaaatagaaagtcattgcaaaatatgtggtgtatacgatttcacttaaactttagaatcatagtacaagtctacatttgtactatctacttggtattttaaatttggtctttaacatgtcatggcgttaatccattgaaatatctagtaaattgttttttgcaattaatttgtaaaataaattttgagttatcattccctctggtattgtcccatctgactcgccccctcagaagttgtaacggctataacttatcaagtttactaagtcacggagaggtaaagtaacttgtgcaaatcatagtgctagaaagtggcagggtggaaattggtcaccgatgcccacacacttaaccactgtgcctataggttcaaagagatgaaacactttaaaacttttgaaacatcttatatctttaaaaaattctaaagttagttgtattagtcagggttctccaaagggacagaactaataggatagacgtatatgtgaaagggagtttattaaggagaattgcctcacattatcacaaggtgaaatcacactataggccgtctgcaagctgaggaggtaggaagccagtagtggcagaagttcaaaagcctcaaaagtgtggaggccgacagtgcagccgtcagtctgtggccaaaggcctgagagcccctggcaaaccactggtgtaagtccaggagtccaaaggccaaagtacctggagtctaacgtccaagagcaggaagcatccagcacaggacaaagatgaaggctggaagactcagcaacccagcttatcccaccttcttccacctgctttgttctagccatgctgccagccgattggaaggtgcccacccacattgagggtgggtcttcttctcccagtccgctgactcaaatgttaatctcctctggcaacaccctcatagacacacccagaaacaatactttaccagccatctaggcatccttcaatccaatcaagttgacacctaatgttaaccagcgtgatagtactttccaagttggtctgtggaacgttagtccaataagatgggcctagaaatagggctctgctatggaatagtttcagaaaatctatttgctttatagtctctactgaagattcacaatggacatccacctactaaaggctctgagaagtcctgcagcaagcacgcctgtttcactttgtttaaccaagtgtttctcaaacttaatcatccatgtagctgttgggcctctaacaaggtagctcaattttccaaggaatggttcttctagagaacgttgagctaggcatttagaccagaagttgtatgatgttggctgtgggtttgaagaagtaaaataaaataaaaaacataaaccagaagttgaaaactagccatctgtagaaggcctctagccagagatgcatcttacttggcctacatagtgttttaaataatattttaattaattaattatatttttgaattaacaaagttgatgatattttaaagcaataatatgtcaatacaattctatatttcagacttccccataatgggtagttttgccctatatttccagacagaatgtgagttgtgactgtcccttaagatggggcacccactctccagttcaccaaatgattcccagcagcgcagccatgtaggttgtccttcgtcataacacttgcattggtatttttcttgggtacagttgagaatcaagtaaatacacccatcatggaccactttacttccttcatccttcatagcacttatcagaatttgaagctacttagatgaccatctgtcattccagcctgagagtcaatcaggcagccagtgttaagcaatatataaaaggggtgggaggctgggcgcggtggctcacgcctgtaatcccagcactttgggaggccgaggcaagtggatcacgaggtcaggagatcgagaccatcctggctaacacaatgaaaccccgtctctactaaaaatacaaaaaattagccaggcgtggtggcgggcgcctgtagtcccagccactcgggaggctgaggcaggagaatgacagagcgagactctgtctcgaaaaaaaaaaaaaaaaagtaagtggatactttcatttattcatgcaacaaatatgagtatttcctttgtgccaggaatgattttagattccccagcaggtagaacagtgtacttcatgggagctttccttctagtggagagaccaacaatttaaaaaagaaagagaattaacaagcaaacacttccagagtttagaaagagctctgagtgaaataaacagagttttgagatagaaagtagacaggagagtgaaaatcacaactgggtgaggaacagaaacagagaagtgtttaaacagtcagtgaatagcatgtgactttttctttctttctttgcacgggccaaacaattcttagaaagtctgcaacctaattctggcagcattcaaaactgttttctcgctttggggaagtgtttgttaaatagatgacgaatgtgttctaggctgtggattattagttttttgtatttaaaggcaggttttctggtgtggtttttgtttgttttttgtttttgtttgtttgttttccgtaacattgggtatttttcctttagtaaatgtgaaatgctgtcaccagtctggaaggttgtgcttgttaggaactaatcatggaacagaagaatcttccacaaatcccttttgcccagtgtggcttaccctgggaatcactcttcactcactctgcctgcagcagtatttttccattttaaatcacacatattggccgggcgtggtggctcacacctataatttcagcagtttgggaggctgaggcaggaggatcacttgagaccaggagttcaagaccagcctggccaacatggtgaaactccatctccactaaaaatacaaaaattagccaagcatggtggtgcacgcctataatctcagctactcaggaagctgaggcatgagaatcgcttgaacctgggagatggagattgcagtgagccgagatcgcaccactgcactccagcctgggcaacagagcgagactccacctcaaaaaaaaaaaaaagaaaagaaaaaaaatcacacataagggaactatacttaagagtgtgccaactcatgtgtccttaggactatccccaaagcaaagcctgctgccaaaagggaaacaagagaagaacattttattgcttaattctctacccacattttacttgccattggaactcaagttgacaaattcacttacccctcaagcagaggagttgctgagggagaaaagagaaaatgtacactagctttatatgggaagcaagtgtgcgttgctttcttagatagatttctttcccccctccccctatgtgaacaacagacaatgctttatttaatcttacaaatgtaacatctccacatcagttaataactatggattaatgatgatgtaccatgctaaggccctgggctagacttctgctacccccgtgtgagatgagccttaagtatcctgaggttatgtccacagggtagtaaaacaggtagtgatgttgtgatttacagtagagagtatcacactggataattggtccaacccggcttggttcaattagtataagcagctgaaattaacattgcctctctcttccccaaaagaggaagaaaaatggctaagtggaacatttttatatctgtgttatccagactcaatttccatctcagaaaagatgccagaggacaatggaaatctagatttcttggttttatattttcatgttattttatttccctctgaagtcttagataatttcttaatcaactacctggaccactaagaagcttgtttccaccgtggcgctttggcagtatgcaattttaaagtcttcaaacacacatgctttctgaatgagcaaatctgcatttaagaatttattgattgataggtcaggagggtgactatagtttactgtacatttcaaactagctagaatagaataagtcgaatgtttttagcatgaagagaagacaaatatttgaagtgatgaatatcccaagtacacgaatttgatctttacaaattacatgaatgtattaaattatcacacgtaccccaaaattatgtacatctattatgcatcaataaaaaatgtttaaaaataatgtattgagaacatgatcaatattttatgcatggggctttaaaaaatttccagtattgtctgtaagaaaaaaagctgaaatgatccaataggtctttcatattgattgtggcacacccttacactagacaccgtaaacgagggtgacataaaaatagaattggtcaggtgaagaaagtgatagtataatgttaaatgagaaaagcagatttcaaaatagcatgcagaagaatctcctctgggtaaaaatgatctctgccttcctgtgccatagctctgtcatcccacccaaagagcagcgtggaataaaaaattgcaaattgttgacagcagttgactttcagtaatagaataatcgatgcatttcgttttattctttgttatctgtattttctcttttttataaaaggagcactgtagtgaaccaccaatctaactaaaagtaaaaaaatgccaccatctaggtaatttctcgattcctcctctagactgcattaagaggctgaggattcctgagctgtgttaattagaaattgccacaggctgctagcaacagttcaacaagaggttattttcctctaacaataatttccaaactatgccacccagagcttatgtgacaattcattgttcagaaagaataacaactttttaaatatacttatagctaatgtgtaatcatctccagcaggagatcacaaagagaaatgttgtcctaagtgggcagatttgaagccctttcataattggatttcctatggttgtgctgtctgtgttctttccctgtttttgccatgggcttgaaagatgtgaatgcattataaaaaaaaaactactcattgaatttttatcagttgatgtgaattgggtaggagtagtggaaaaaataaaagtacagaattacctacattaatatatatttattgaccttccttcagtggctttgagcactgtagtaaaacaaacttaaaaaaaaaaagagtttgggcatggtggctcatgcctgtaatcccaacactttgggaggccaaggggggtggatcacctgaggtcaggagtttgagatcagcctggccaacatggtgaaaccccatctctactgaaaatacaaaaattagccgggcatggtggcacatgcctgtaatcccagttactcggaggctgaggcaggagaatcacttgaacctgggaggcggaggttgcagtgagacgagattgcaccattgcactccagcctgggcaacatctcaaaaaaaaaaaaaatcatagtctgcttaggaaattctgagattctgcaaaatatttttagtattggtcttcacattccttcctgcttgcatattaatttgctttcctttctaggcaaattgggggacaaattctatcttcaaaaattaaccaaaccctatttttcttcctgaatctgacaatggctacacgcaggtgacagtgttttcagaagaagaaaaatgaagacttcgtgattgtccagagactattgttgtccagcaaatcgaaccctctgtgctcgcgtgatattctctggggagaggaagcagagccttcccttttatcccaggcagcatggggctcaaatttctgacagatggaaaggagtggagtcatgagtttctgtaccattcaacatttttcacacaaattttcttgtgttcacctgtactttcagtactgattcgtggtgttaagactaagagtaaaatcagtgctacacaatgaggaaatctagatggagtagaggcatcacagatcattccagacaaggctttttaagccttatcttatattttcactttaacaatgtagatctgcttaaaggagtctgaagtccagctgacaatagttgaaagaaagtgccagaagttccatatgggccttattacagacaatcaaattatgataaggcggcattatttttcaacatgacaaattgtaatcactttagcagtgttcctatctgtttgctctttgaagccaacaaaaaagaaaatatatataaacttctcacacagaggtgaaaaacaagctaacaccacggacgcctgtttgcttaaaaacagtttccaggtattttctggagaatgtttctgtttccgtataatgttgtttgctgagaatgattcggaggcctgatgagaatagcagcagcacctacaaataacatgtttaaagcacaggccacacactggtggcctgaaggctggactctcatcacaactgtgcttagcttggccctcttgatgtttttaaatttttttagttaatcatgcatattttgctttagtcttaattttaatacgtaacatattcactctgttcaaaacaaaaaattataaaatgccacccagtagataattgctgtttgtatttttaatgtatctttctagggttcctttgagcatatataagaaataaaacataaattctttttctttcttttttacacaaacggtaacataatatgcactctgttctattccacgcttgttttcagttaacaatactttctgtatctgtagggagcttcctcacttgtaatgcctgcagagtattctgttgaatggttgtaccatgagttatttaaccaggaccccatttaatgcccattggctggcttccagactttcgctattaacctcactgcaatgaataaccttgtacatttgttatttcacacgtgtgagtttaggtttatcctctacatcaactcttagagatggaaatacagggtaaaagaatatatcctttttacagttttggtacacaatgccactctgccctccatcaggattgaattagtttatacttgtaacagcaatgcatgattgccttcttcacacaagcttggccaatgaatgtttttgtaaacatttggatttttttacttttcaatcttccttttcatgacttctggatttctagtcatacacacaaaagccttctcaatccaaaatgaaaagctgttttccatgtttccttgtattatttttaatctatttggattttatcctggtagagggttgagttgtgacaccaagttaatttttttccagatggctgctctgtttttcctacatcttttatttaaaagttcttcacttccatagattttaggtatcatctttatcatatactaaattcctatatgtctttggaattttaccaccttgttatcatcagccatacaacgtatgcatgtatgcctgatgctaacatatgttgtatggttgatggtaacatatgttgtatggctgatggttacaaagtagaaaaatatacagcagagaaaaggaataaagtggcaggaacttaaaataggaaaggacttgctgagaagataatatttgagtaaacatctgaaggaaaggagatagaatcagtgcagcacagcactgaaaaacctttggcctctgaaatcagctgggcctgggatcaaatcccaactctactttatgaccttaggcaagttatttattctttctgtgcattaatttcttcatctgtataattggaattacaaacagtgcatgcttcatgggatcgttgtaagaattaaacgggatctttttaacaagcttagcactgggcctgacacataaaggctgatcatttttacggttatcatggacacttattttgtcattacacactccttaaataattcatggctgcaaaatattccatcacacattgttatgggttaatttcacatgttaaaaccacatgcgaatttatttaactgcagatcccaaaagttcaactttttaagtggttcttcattgttgctcttccagaattatcctatcaagctttttttttttttttttactttttaactttgaaattattgtagattcacatgcagctgtaagaaatacaacagttatccctttatccagcgtcactcaacggtaacatcttcagacctgtagtgcaatatcacaaccaggatattgacaatgatacaatcaaatagagaacatttttatccccacaaggatactgcatactgactgttcaggtgcatccacttccctctcacccccatccttttcttacctcctgcaaccactagtctgttctccattgctatagctttattatttcaagaatgctatctaaatagtatcatacagtgggtacccttttttacataggcttttttccccttcagcataaatctctggaaattaatccgaatcactgagtgtcttggtagatattggtccttttcgactgccaagtagtatcccatgctgtggaagtaccagtttgatgtttggttgttccaactttgaggctattgtaaataactttgctataaacattaatgcataggtttttgtgtgaatataattcttcatttctctaggagaaatgaccaggagtgcaatcactatagttgcatgttttatttatttatttattttaagtttttgagattggatcttgctctgttgcccaggcaagtgcagtggtgccatcttggctcagccacccagggtcaagtgatcttcccgtctcagcccccagagtagctgggattacagacacttgccaccacgccctgcctgcatgtttaattatttaagaaactgtctaactgttttctattctgcctgtatccctttacatttctaccagcaatgtaaagtgattacattgtaaagtgagtaatcgagtttcttgcatccttcccagcatttaatagtcactattttttgctttaaccactttgatgggtgcatagtgatgtctcgttatggttttaatttgcacttttctaatggttaatgagattgaacatctttatgtgcttatttgccatctgcatatcctctgcaatgaaatgccccctcacgtcttttgcccattttctaattggattgttttgtttgtttttaatgttgagttttaagaatttttttcttttaaatgtattctaaatactagtctctcgtcagatacgtggtttgcaaatattttctcccactctctagtttctcttttcatctttttaacaggatcttttacagggcaaaattttttagttttgatgaattccaatttattatgttttctttttatggattttgcttttggtctttggtcttttatggatttttttaaccataggtctcagaaattttctcttatttttttcctaaaagttttatatttgaggttttatgtttaagtccacgatctcttttgagataatttttatataagatgtgagacttaaattgaggttctttcttttcctctatagatgtcaaattgctctagcacaatttgttgaaaagactatctttattctgtagaattgcttttacacctttgtcaaaagtcgtctgggcatacttgtgtgggtcttttctggcttctctattccattggttctatatgtctatgtctccaccaataccatacagccttgcttactgtagctatataacaaggcttgtgatcagatagactgattcatcaatttatattttaaaaaattattctaaatcctttgtctttccatataaatgttagaataacctcatctatctctacaaaatgtcttgctacaagtgctggaattttgacaggaattgcattaaacctgtatatcaatttggggcagattgacatctttactatgtgagtcttccaatccatgaacattgtgtgtctctccatttatttaggtctcctatgatttctttcattagcattatatagctttcagcatacaagttttgcacatgttttgtgagatgtaaaccttagtatttcattttcgtatgattattatggtattgtatttttaatttcagtgcccatgggttcattcctagtatatagaaatctagatcatttttacatgtttatcttgtattcttcagccttgctgaactcaattattaattctaggtgttattctgttgattccttgggattttctaattttgaaaataatgaaattgtctaattttgccatcttctctggggacagttttatttcttccttttcaatgtgtattccctatatttattttcttgccttaatatacttcctagaacttccactactatgtagaatacaaataatgagagctgacatccttgccttgctcctaatcttaggagaaatgcattcagtctttcagaattaaggataatgttagttctcaatttttattttgtagatcgtctttatcaagttgaggaagcaccctctgttactgtcttccttagagatttatcatgaatggaggattgaattttgttgaatactttttctgcattcactgttgtgatcatgtgatttttcttctttagtctgtcactattgtggataacatcaattgactttcaaatattaatcaagcttgcaaacctatagtaaatcccatttggttatgatgtatacttcttttgacatattgctgaaatctacctgctaatattttgtaaagaatgtttgcatctatactcatgaggcatattgatcagtagggtatttttcatttctttggtgccatctttatctgtttctggtaccaagtttttggtaactatctttataaaataaattagtaagcattccctcttctgttttctaggagatttcatgtagaattggtgtaattcttctttaaacatttcatagaattctccagtgaagtcttctgggcctgaagacttctttcctggaagtttttaaattatgaattcaattttcttaatagttatatggatatttaaatcatttatattatattgggtcagttataatagtttgtgttttttgagcaaatgttccattttgcccgttatcaaatttatgtaggtagcattggttatggcattctcctatccagttttgtacctgatactggtaatctgtaccttgactctcttgctctctcttttttgttgtcatctgttgtctctactaatagaggtttttgctgctgcttctctctgtctctcccattatgctgttgatttcactcactgggctttttgttttcattattatacctttcaattctaaaatttccattttagttatttttatatcttctatttctttgctggggctttctattttttcatttgtttcaagcactgttacaattgttaattgaagcattttattgtgactactttaaaatctttgtcagaggccgggcacagtggctcacgcctgtaatcccagaactttgggaggccaaggcgggcagatcacttgagtttaggaatttgagaccagcctggccaacatggtgaaacccatctctactaaaaatgcaaaaattagctgggcgtggtggtgcacacctgtaataccagttgctcaggaggctgaggcaggagaattgcttgaacccggtaggcagaggctgcagtgagccaagattgtgccattgtgccattacactccagcctgggtgacagagcaagactccgtctcaaaaaaaaaaaaaaatctttgttagataattctagcatctctgtcatctcatttccaggttgacatctgttgattgccttgttttattatgtttgaggccttcttagttcttggtatggtatgacaagttatcttcaattgaaatctgaccattttcatattatgagactgcatcttgcttaaactttctattttagctggctgtcccggacaccattccagcagtactggggctgctacctcattactgtcaggtggaggcaaacatccaggtttctcaccagcctccattgttggggggcgggggtatactccttattactactgggtggaggcgggagttttctgctcacatgaccttcactgataccacagtggaggtctcattaccactggctgacgctaactccactgggtctcttctcacaccaccccagtggggagagggaggagcatctcattgctcctgggtggggttggaagtccaggctccccatgtggtccccgcggacaccatggtggggagggcttattaccaaccggtgaggatgagaatcccagctccctacttagccccacagatgccatcttgcaggggtattgggataacctattacggtcttgtgaaagtggaagtctaggctccccacttggctttctctggcatgggagatggtgagaccacagaatgtcctgtggtatttggctggagtagtatggtcattgtctaaaagttttctgtcttgccagattgccctttcctggtcctttagtcagagagagtaggctttcggaaaggatttgtgagtatgtcagagcctataggtgtttccaggttgctaatttcttcaactccaagtctggggtacttgaggcaaaaagaaaacccaaggaattcaccatcgtgtttttcctcgggtcctcagctggtctgccttctcttctccacctttcagaatccttttatgtatgttttctctataatgtccagggttcttcattgtccttggtgagaggaacaggagaaagtgtgtgtgccccatcttcccagaagcagaagtcttatgttattttttaatgtcaatctaagaagaaaaaaaaaatatttcaaagtaagggcttaagttcaagctgagaatttcacctggaaaggccataaaactctcactcaggaagagccacaggcaaacctactccttgccctgggccggcagatcttgctcctccatagctactgtctgtccaaggcaggagacattactgcagttgggaaatcagggaagcagagaggctagagaagatgtcatggggcaatgcagaaaggcagcgggctcctgtgttcctggagttcttttgaactgtgtctgctccagtagggttctttctccaggttacggaagtactcacagctttcttcctcattcagagggcgtccatcatggcagatcctgatggccacctagatccatagggtccacttgatattttagtaattcctagtcccttcagctgacatcactgtattccattttgttttgagaaagttcaatagatatcccctgtatgtctagccctggaaccacaaaaaagaatcattgccttgcagccctttaggaaacccaatcaggacaggagctgcgggcaacctagacatagccccttttattttctgtgatgagcactggggagcacgtgggctgtcagaccggagtagctcagagcagtggacccaggctggggatcagaagagctacctccttgcctccacgccaacttcagagaaccttgcctactgtctaagtagccagcagcccatcacctcaccctccgtggccttgccttttcttttctccttagcagccctcaccacctgagtcatctgtgagatgtattagtttatctgtgtttttgtccacttcggttttttcccttgtgagaatttcagctccccaaggactgtgagctgtactctcactgcctccatcagtgggaagcacacagtagatatttgatcaaaaatttctctcctaatctttcatgacaccgtaggcaagtccccagacttgctgtgattcaaaagtcctgttcaatccaacttttttttttttttttttgagatggagtctcactctgtcgcccaggctggagtgcagtggtgcgatcttggctcactgcaacctccacctcctgggttcaaacaattctcctgcctcagcctccaccgtagctgggattacaggcatgcaccaccacgcctagctaatttttgtatttttaatagaggcggggtttcaccatgttggccaggctggtcttgaacacctgacctcgggtgatctgcctgcctcggtctcccaaagtgctaggattacaggcgtgagccaccatgcccagcccaatccaactttaaaactttaatcacacattcattataacattcatcccaattcctgctagaaccaagctctgccttgaccatggcctgaggtccttgcagtctggaagaagggggacttgctttttttcctcttctcgtcctcccctagtgcatgtgagtttagggaggaggggttaaggggaaagggctctaggctttttgccttgcagattgttctctctgactctccatatcttctccgttgtgggcatccacatgatgtttctcttcagggaataggtggggacttctccacttcaaaattatgtgatggaaccctctgctgcttctgctgctgtttagcccctttgccctgtgcccaccatcctggtaaggtagagtgaggctgcctgagcccaaacaccttccatggcacctactccttaaatgtcagtcaacacttcctcagtctgactccaaattattgttataaccatcttgcttttcataacccccatacctctgctgaactgaataacctgccccctaaaccctccccaaacccatccccacctcatctttttctgcatttctcacatgccttcctccatgtccacttgacagaaatttctccatcaccatcccgcattcctccctgtttctgcgagtctacttgcaacctatgctccatggccttggggaaatgctgcttcatcttcaagtctccctctcccttctagttcagtcactcttgaccttggtgcacactggaatcacctggggaggtctaaaaatattgacatctgagcctcgcctccaaaaagactaatgtaattggtcggggtggaatctgggtattggcatttgtttaaaaagctgcccaggtgattctaaaatccagttatgctgagacccactgggctgatgaaattaacttgtcttttttttctttttatcttgagacagggtcttgctctgtcacccaggctggagtgcaatggcacaatcatagctcactgcagccttgacctccctggctcaagcaattctcctgcctcagcctcccaagtagctaggaccacaggtgcatgccaccatgcctggctaatttctgttttgttttgttttgttttgttttgtttttgctttgtttcatagagacaaggtctcactatattgcccaggctggtcttgaactcctgtgttcaagcaattctcctgcattgacctcccaaattgctgggattacagatgtgagccactgtgcttagcctcacttgtctttttatcagagtacttgtccctatctactgacctttatccaccataaggctccaagcatctaggagagaagacagtgtcagattcatttttgtaaatctcacagcttaccacagtgctcagtaattaaattaaacacaataataatagctaaccattactgaatgcttcctctgtactgcacattctcctaagtcctttatatggattatcccatttactccctcaacaaccctaaaaggcaggtgctactcatcaccccacttttacaaatgagcaaattgcaacctagagttagggaaagtgcagtactgcagaggtgtagatggcagagcagggattggacctgggcagctggcctctgcacagcttgtatgtagtcacattgagggttaggatttggggagacacaaactttaagtccacaatacacagtgaaagcataacttcagagcccatgctaatgctgtgtggcctctgcacagcttgtatgtaatgtaactacccccacatagttactgagtgaggatgaattcatgaatggtgctcctgggcaacaccttacttaggcctgtggggaatttctcagtctagatttatgtcttgtgccactttcataatgactcatcttcaagacacctgttcagttattcatgtaatagctttatttaaagtttactttatattgaacttcacctacacaaaaatatccataatatgaaaaggttgatgctggacatatttttctagtgcacattgtcttagttcaggctgctatcaaagtaccatagactggatggcttataaacaacagaaattgatatctcacagttttggaggctataagtctgaaatcaagatgccagcatggttgggttcttgtgaggaccctcttctgggttgcagatggccagcttctcattgcaccctggaatgatggaaagaggactagaacgctcgctggggtctcttttataagagcactaatcctattcatgggggctccaccccatgacctagtcatctccccaaggccccacctcctaataccatcacatcagaagttaggatttgaacacatgaattttggggagacacaaactttcagtccacaatacacattaaaagaataactgtgtgtgtgcgcggacataccacctaaaataaaatcgccttcctcatacgtatatcaacactcatctgctataaatagaatttgcagccatccttctaatcaaccagcttaaccgcttggatcccagttatacctcagagttagtttttaaaagttcaactcatattagaacctgtttttaaaaagtacatctcttccaaagcaaaacacttttctcccagaattaaccagaaaacctaacaagactattaagaccatggcttttatttgcttttagttttatgaagcttcagctgctcatgaggcatttcacaagaaatatgcttccatttagaaagagtcctggggctgattgaaacccttgtagaatatgtgtattattgttacttttaaaatactcaccaaaatgtgctttttgtatttttgcagccatttcacaaaagccccatttttaatgcaaactattccaacctggcctttggtgttaggctggtctaagtgcataatctaagtaccaactgagtgctgagaactgtggtatagaaattcagagaaggggacagagtccatgggtggcctgacccagaaaaacgtcggtgggagagggagacttgattccaatcgtgaagaatagatttcaaaagggaagacagaagctggagagcacagtgtacaaaggcatagaaaaaagaatttactccatatcctttcatcctttaacaaatgtttctcctgaatctactctgtgtcaggaactttgcaaattgtatggcattttcattgcttttttttttttttttttttgtctgtttggctaacatttattggacacttctatactaggcattatgctaaggaatttacatgcattatttcttatggaaactcacaacgaattataccaggcaaggtttattattaatcttgtgttccatgagacgaccttgtctcagagaggctaagaccccagctggggttcctcaacctgtgagtggagctgggaggtgaatatggagtctttgtcaggcactggaacttttatcaaccacttgatcttgttgtgaatgagacacacgcagtgcctgtcctcaaatgcccagttgagcaggtgatactggcaattaatcaattatgattcagtatgatgggtactgatgagaggggaattaggaaaacaaatagcagtaagagataatgagcttcaattcttgtttgcaaaattactcaattgaatatcagtctatgggaaagaaagagagattgatcattgacattcattcttcccttcatttattcatttataaataatgttcataatcattatcactaattaatataaaaagatctgctacacccctagaacaagatttattattaattttggtgacaaagttcatatttcaaatacacttattaatttcaaatttagggagctcacttcttttcagacctgatttgatcctcattgctgttcacatgataatgtagctcaagattcatgcatcaccaaaaacgaactcacctgtagccagctacaggaagtcaacactctctactattaacagagtagaagctttcagctaagggagagttacaggaactggctttgccctcttgcctaaaacagatgaaaacttggacaaaaaaaccaaacaacaatttttaagactgttttaagatatcaggcaacaaggataggtgttctctgagagacgggacataagagataatccctgtgtctgctcctacctactgccttgagagggtttccagcccatagcctaggggggaggaactgaggcagagcccagcaggctccctgagcccaaggtggccagagttcatagacaaagcatcagaggagagagagagatacacagagagcaaactccaagggtctgtcaaaggtcctcacatagtatgaggcagagagctgaccaatatgttcatatgaggaaactagcaaagactgaagggggaaaaaaaaaaaaccaaccaccagaaaggcatttacacagggccagagagagtgccttctctcaccagccagactagaaaacctcattattaataaggcactgggtagagtagtcacagggtctttcctcattagcgagaaaatattagcttcctagactagacacgattttggtcctacctaatgtaactgccaatgggttatttttgcccgctgcccagacagagccaatttatcaagacaggggaatggcaatagagaaagagtttactacacatagagccaattaaatgtgagattagaacttttttattactcaaatcagcttccccccaaaattcagaggctagagttttttaaggtcagtttggtgggcagattgctaaggcgtggagaatgctgattagttgattgggggcagaatcataggacatcagagatgtcctcttgtactgagtcagttcttgggtgggggccgcaagtccagatgagccagaccagaatgcagggtctgaaaaatatctcaaacaccaatattaggttttacagcagtaatgttatccataagaacaactggggaggtgaagaatcttgtggcctctggctgtatgactcctgagccataatttctaatgttgtgtctaatttgctagttttacaaaggtggactggtccccaagaataaagggggcttgtttggggaagggactgttattatctttgtttcaaagttaaactataactaaattcctcccgaagttagtgtggcctacccccaggaatgaacaagggcagcttggaagttaaaggcaagatggtgttggttaggtcagatctctttcacagtcataattttttcactcataatttttgcaaagtcagtttcacgaacaaatcttaaaagccagaactaaaaggatcaaactgattttaagtatcttaactacctccaaaaacaaagttcaaaaatatttataggaacaaaaaatatccagccacccaaacaggtaagattcacaatgtctgacatgcaaacaaaaattaccagggaagcaaagaagcaggaaaatgtaactcatgatgtgaagagaaatcaaccaaaacctacccagaactgacacaggtgttagaattggcaaaaaaataaaaaggattagcataaatgtgtctcatatgtttggaaagttaagtagagacatagaagatatatttttaaaatccaaatcaaatttctagagataaaaactacagtgtgtgaggtaaaaaatacactggatgacattaacaacagattagacaatgcagaaaaaaaaattgtgaatttaaatacacagcaatagaaactatccaaaaggaaccacagggcagtgggtgaaaaggaagagggctttttcaaaaagaaggaagaaaggaacattaatgagctacaggataacttcaagtaggctagtaggcaggtaattggagtccatgaaaggagagaaaaggagagaagaaaaaatatttgaaatcataatggctaaaaattgatgactgatactctcacttggattaaatcatttgttcattcattcactagtaatttttgagattgtaccatgtgcacaagtctgggtgctggggaaacataagggagaaaaagaaccttcattggtttctattccagtgaagggagaggaacaaaacacaaaatgacaagtgagagttttaatataattctcagtcttgccactgagagccagataactctttgtcctgggcattgcaggaattttagcagcatgcctggcatctatcctccagataccagtggtaaatcactaacccgctactcgtgacaatcaaaaaaatgtctccagacattaccagatgtccttagggggaagaggagccagtaatatattagaagtgaaatctactaggagaaaaataaagcaattagcagcatcagatatgccgggatatattatagcaacttaaagtagagtggtaaagaaagacctcgatgaaaacgtggccattggctcaggcgcagtggctcatgcctgtaatcctagcactttgggaggccgaggtgaggggattacctgaggtcaggagttcaagaccagcctggccaacacggtgaaaccccatctctactgaaaatacaaaaattagacaggcatggtggcacacactgtaatcccagctacttgggaggctgaggcaggaaaatggcttgagccagggagacagaggttgcagtgagtcaagatcatgccactgcactccagcctgggtgacagagtgagactctgtctcaaaaaaaaagaaaaaagtgacaattgaaaaagacttgaaagaagtaaggtcacatgctcctggcaggcagaagctcagcccagatgcaaaggtcctgaggcaacagcctacttgacatgttcaaagaagagcaagcaggtcactggggttacaaaagagtgacccagggggaaaataaaacaaaaaaaaacgggcaggaaagcaatgagaatggaatggaagaggggcacttctccaggaatgagcaggagggtcctgttgtcacaaggagtgaggaatgctacttaggcaaaaacaaattaatgcttacgcttgccaactgtggccttggacatgatgtttaaacctctttgggcctcagttttctcatctgtaatttgccttgcacaatcttggcaaagattagataagatagatttgtgaaggcacctcgtaactgtaaagctatacaagcataaacaagcattgtttaagacgtaaggatgacatggtttaaacaagttataagtgcagtactttttgggagagttaagttatgaagggtttttactggtggaatttatggatgtagtctatatttatatacactccctatgaggatcttggttttccaccacctggatttaatttatatgatgttacattttactgcacacactatataagtttagcaaagttgacactcatagccaaataatctatagaattttaagatgttcagttctgacaggcctgacttataatccccatattggcctctctcaagctgtgtgaccttagacaagtaacctaaactctctgagcctcatttcattgtttgaaactgttaattgtaatatttgtctcagaagattgttgtaaagattaagtgacatatgtttaatgcatttatttgtatagtggtttgcatgctgtaaatgtaaaatatttgacgtattggcattgtatattattctataataaataataatatattaagattaagcgaccttgttcaaattatactagcttaggaaagagaaagcactggtgtacatgtaatgcttaataagtagttgacgtaatttgcacatctgtccttacctaaatctcatgttgaattgtaatcccctatgctggaggtttggcctggtgaaagatcacaggggtggatccatcatgaatggcttgggccatctccttggtggtaactgagctcttgctctatgttcacacatgatatggtcatttgcaagtttgtcccaccaccccctccactctttctctcttgctcctgctctgaccatgtgctgtgcctgctcccacttctccttccgccatgattgtaagcttcctgaggcctcccagaagccaagcagatgccagtcccatgcttcctgtaaaggctgcagaactgtgagccaatgaaacctcttttctttataaattacccagaatcaggtatgtctttataacaacgcaaaaaatggcccaatacaatcgtccattaaaatgagttgaattgtatctcagtggttgggatagtcaacccatatcaatttatactgcttgtccagacactgccaaccccagaggagaaagtataaaatccaggagtctaaatgcagtgccaccatatcccactctccactactgagagaaggggtcaaaatagaaataccaagtcttctgtgggcttctgccacctcacacactgcgaattgttagaaatcgcttttgaggaaacagaagtgtctcctttcattctcctctaagtaagggaactggcagcatgggggcagggagatggtgtggagaaggcggaacccacagccctgggatgaaaggaaggactacacggggatgaaagggagggcgaagagtgaagacgatgctcaaccagcaggtgagagtcgagtccgcctccctcactccacccacctccagaccaagctccccactgccaggccacaaccacatgcaccaacctgcccagcccggatacgttttaggtctcacttgtcacaacctccggtgcaccaaacagcttctcagatgcaccgatgtacctgcaggacctctctgttgaaaccttctcattttttgcaagaatattcatcaagtttatataatttgcatacctcttgacccaaaaatttcatttttgataatttacccaaagaaaatatagatacatgagtatttaaaaataaaagtgtgagatgatcactttactactgcttataatactctagatgtacaactatacacactgtgaatgtccatcaataaggatattagacaataaacaatgttataaccaagcaatggaataaatgtcacctgagtcgtaaagaatgaggcaggtttagctgtgttgcaatgggaagtttctgtactactttgtcacatgagaatttatgctggtacagatagcactattctatgtttgtaaaattttcataaatgatacatatttattgaatgccttctgtgggcctcgctgtccttggtacttgagaaaagcactgagtgaagtagatattatccctgtctttgtcgagtttgtagtctaatgggagtatgaggaaaagcacaaagactgagaagtaaacagaactgctgacacagcaaagatttttaaaagggcaagggactctggtggagacgacagtggtgggaggacagccttagatgaatgtttagggacaatctctccaaagagatgacacttatgaccttaaggatggatggaaattacctacgggcagacagaggagcagaatgtttcaaacagagagccagaagtttggaaataacctgtggtatgtttgaaaaactcaaagaaagtgggccagaaaatggaatgaaggagcacgtggtacagagaggatggagatttaggcaggggcagaccatgttagacgttggagatcctgcatcagagtttgggcttgactccaagagctgtcagaagctactggagggtggtaaggagtgggaagatgggatctgttgagtaaagaatgtattgtgagggtcaagagcccaaccagagacaaggccagggctgttgcagtcagaaggtggagaggcagtagcttcctgtcctggggtcgtgagaggtgagatggtgaaaggaaggcagattcagaacgcatcctaccctcctgaggaggtcggggagaaaatcagttcccctatcacaccccttgcacagatgaacctcatatctcaaaagcaaaatagttatttttaaacaccagtactttttctttttctttttctttttttttttttttttttttagttgatataatccaactctgtggaaattgtgggaaacgccatctctggggataatgtacacatcatagataaggagactataaagatggaaaatatcgataccttacacaacttctttgcagaattggaagaaaagggtttttgtttgaaatgcaacgtgcactgctgtgtttgttaccctttggctccaaacaatgtccctccaaccaacagcaaatgctgaatatgttagaaagagggggagggaaggaagagtgactcttataatctcatgattgttctgcacgcctgtgggcagaagaagtatggctggaattagggggtaagagagaaaggggtgtgaagcaaaagtatgactttgagagttcacattcagcaagtggcaactgtgacaactgttttgcccctaggacatagttgacggcaaggaaaaagaaggacaagaacttggaactgcggattgctctgtccctggggacccagaaggactggagactgcaaaggacgattcccaggcagcagctatagcagagaataataattccatcatgagtttctttaaaactctggtaagcagttttctcctcttttcccctccactctattgctcaaaagttttgttaattctaagaataatgcacatttgaatgttattgtactaaatgaattatcatggtgctgttggagcatgggagagaacagggacaagatatgcttcataagaaagttgtgttatatcagacttttagcaagagagcccctgaagctcggaaccatggtataagcagtggatgcccaaatcatgtaacatgggctgtgttgtaatggaattctattgcaattgaatgtcttatgttcattgatcataaaaataattgaaaaatatctccctgtgttgtggacatctcaaagcagttttgccactcaagtggcaaataaaatactgtagaaatcattcaaaaaaaaaaaaacctgaatgaatgaatgcatagtgaagcagactgtcccaaatgtgtttgggctattttcaaatatcaagactaacctcaaaagaaaaaacaataaatgtcaacagaatgtgccacaaacaccagagggttgcacatgtgtttggagtaatggtaaaatttattggaagtctgtggtcttccaggagacaattttgaatgtggtcaaactcttggtaaatgtataagatcagatgtatctcattataagatattaattttgttaacttttgtattacccggcggtcctgagatttctattgaactaaaaatacttctcattttattcttgacctgtatggtgaactggaccaccctaaagagttatttatctatgaaataaaaatcactctaaagagcaatgatttctaatatttggctttctcaaacttttaaggtttcacctaacaaagctgaaacaaaaaaggacccagaagacacggtaggtagttggaagtgtgtatgtatatatttgggtttgcgcatagaattggatttggatttgtgtctgcctgcttgttttttgaatacatatatgtgtgtgtgtgtgtgtgtgtgtgtgtgtatcatatctatatataattagcaatttaatagtgctgttaggttgtcattaaaatattttatttacattaacagtagttaaattaaaattttactggaaagcttgaaagacgtgccaactctggctaaataatatcacaataccaatttcttatatagcataagaacagaatactaataattatatcatcatcttagtctttttagttgtgcgtagagggacccagggaatatagtaaaaaacagtccatgtaaagtagaagaaagcttttcagtaggacgtggactctaaaaaaataaagtagaagaaagctgctatatttttgttttctaaaaaatatgttatttttcaatgtaatttgaaaactaaataaatctttactgcaaaggcagtggtttggtgaaatagaatagtttccctggggcacctgccaaacggatggccatgcagaggcgttaggacacgctagagagcctaggttcttcactgtcatccaagaattcagcccactctcctcaaaataaacttggtttgaaataccatcttcctagagatgttctccctttacactggacaaggctcgttacctctagtggaatacacggtttaagtttcacgggaaccatgaaggaagtttaacttggtgacagataagtgtcttgggtccttcttctgatatcggaaagtgctttgaaaaacagtgggatcagatacatggcttggtttgccccctacatctgctacccacatgtgaaggagctggctgtgaaaagaggatcctagattttgtctcaaaagacctgcatttcagctccagttctgctacttgatagtggtacaatcttaatctgtctgaacccaagtcttcatgtctataaaattgggacaaaaaaattctttgtcctggaccccaaggttgaatgaaggtgtggcattgttttgcaaactgtagagctctgattaaatgtagcgatccctatttcaatgatcacagccaagattggttgaatgacatgactacatttgtattgtatttcttggtttcctcgagaattttcttcttccattggaaaaaaatatgtatctgaagcatctacatgcattttcctataaagttattcatttgctccgaggtcatagggtcaagttcaatgaatggttggggcaaaacgtatttcttttggttctatgtcttgcgttgtttgaagccacatagcgtaaaaggctctaaacagtggagtatgggaatgtgtgtgtggcttcccaagtgacctgatgcactcattctctttagctggtcatggaccaagactcctccctgacccagaatgtggtcaaaactgaacgtacccagctgataaaatctcaccgtcctgcccaggaagctgtggggtcacattagtggagctgggtctcaaaagcgggttttgtgaatgtaggttgtccatgacacccacaaacagatgtgttttctacaaacctggttctcataccttgcaattttgatatcttttctactgaagttcttggattcatgcttttgaagtctgtattgttttcagcccactaccttccctacacgaaagtccctgacatttgtaacttgagccaacaatcttgagtggttgtagccaggctatttcggtttcgatctccctctactttgcctcagtggattggttcacactacacattttctctgcctggcgggggtctacccatctagaagtgaattgaaatttttgcaggtgatattgcttccataaagtttctaatagtgaatcaaaggagatcgatttgagactaaaagacattcagcagcagtctttgctttgactccaggatgaaaaagaaatattttgtctgcaggtattttttactttaccatgtagcaatagcatttagatatctacaactatcaagtagagactgcattatcttctcctgttatttgtcttcagcaaatggagatacagagttttgttttgttctgtcttgctttgaggtgtgttcatctgggtcatttaaataggtcactgttgaaaatcactgtatatctaaaattgtgaatatggaagtttaaaaaagataaacatttacagggtgttttgtggttagaagaggggatggtgtaccaacagttaattgtcacagcgtattaatgcactttaaaacaacagaaaacaaaaagaattttgttcaaaaacaaagttctgaggttgtgactgctgttgccccaaaggcatcgaaagcagaaagtgtctgtgatggacaagctggtcagaagacatccgagatccaggctagaggcaccaagaaaaagcacctggatagccccaggctaggactcgcctttagaaaattctttaggcataaggtctgtatcttattaaagtaggaggaaaaacaagaactctggtcttcacaagacatgtgccatcctgagcccacccagctcctctccagtaaaaacagagccttgggtggtggggatcattaaaagagaattaaagatgatatgaattaaacttcagtgatttttaagtccccatagtcataaacatttcaaacaggtgtcttcctagtgcggaccagggttctggaactattcttctaacccagtatttcccaaatgtcaataacttgtgtaccaccttcaccatttttgttagatgtactattatttgatatttttacattgaaattgacctattttctatttaaattgtatctttaaaagaaactttatatcatatatagaaaatcagaataatttttcctaagaggaaggtaagcattaatttggctaattaaaaagacattacattctagctacctcatttgtattaagctctgaatctgatgctctttctagctttattaaaaggtgattaattggccaatggtagaaaaatgttaaagatgtaccatcaccagactgagactttctccagaatgttagtagaaggattaaatgagagttggaaaaggagaagtggtttcactatttgaatactatgtaatatcatatttctgcacaatctataatcttctctgatccaccaatggtatgcttcctacattttgggaaatactcttctaacctcaagtaataatgttatctttctgtggtctgtttcatctatttccaatattaactaagcttacactgaacccaaataaaagtccaggcggaaaaaagcaatgaatgaaggcagagcatgtttcagctccatgtccttgggaagttaggacaacactgaagtcagtttgggaaatattatgcttccaatgtctaagaagacgccagtgtttgtctgaaaccatcagtttaaaggatccctgaattgggttagcatgcttgaaaatttgtttaaaatatcagccattttccaccaagtcaaaagcctgtattaaaaaaacttccctacctggatgtcacagtcccgggattgtatatgcaaataagcactccatagaaagttctcacagctgaatctgtatttgcgtaagcagactatgttatgaagccacctttcaatttccatacaggataattttgttctgtgaagagaaaagaatggggaatgataaatattgcaacgggggagggaagattaaaatgtgctccaacatcacataacttagtaactgctgggaaataacttagtaactgctggtgaaacgcgtcatagatctcataggaaagaatctagtttaactcccacttggagcttttgtaagtaaggggccttgaaagtttaagaagtgtatgatgtttccccagatctgcctttcattatgacattcacttcatgcactacaaaattttacgtctgcagtatctcttgccaccaataaagggaccacccaagttcaatgttatcattcctagggcttcccaaaaactgttggcctcccatcttgtcactgaggtagatggggaaaagacaggattctggaagagtgggaagaggccgcgggaacagccttctggaattctgtaacacagacacaaggacttcagggttttgccttgagtggcattcagtgtatttttttatgtaagtgtaaatcaaagtaagggacacctcccaaatgttctgaattcttatttacgcagcagtttgttagagctcattggcttttacctctgcacctgagatagttcatttctttttctcttttgattatttctgttgtctctaaagataggaaagtagggcctttaaataaccagccagattctctcagtgacattatcatgattttaggaggtgtgatactctccatttccccatgggtttgtcacctggaaaagaaaacgagaaattcaagcaaattgaaggataaaactattttgctattaaaaaaaaagttaccaattctggttaattctggggctttatttctctacatctctatgatccttcttataaaaagaattttctcagttcaaaaagtagggaagtctgaaatcagtaagtgaaatacatttagtgtcagcttttgctgaattggaaccatttttctcggcctaatggcatgtgatgtctcagaatcaaactttttcatgtggccaccactgtttggtgacaactttagacacaaaacagagcattcctttagaatgcctttgccatgccccaaaatgctcccctctctcctcaggtttccccagtgcccaccctttctgtaaggcagctgaagtattagcaagcagcatgcatgatttataagctctaccattcattcattgtttttggttcttggtgtagtgtttacatcttactaacatctcctctctcccacacccaatgtgaaaacaagacgaaaatttattaagaaggtaaggtcatttgacatacaatctccaaattgaatccactagaatttcatgggcagggccaccaggtaaaatatacaggactcagttaaattcaaatttttgataaacaagaaataactttttaatttaaatataagtatgtcccatgcaatatttgggacatgcttatgctagaaaattattctttgctgatcttaaattaatatttaatggaatatctcatattcttattctcatgtgctaaatctggcaaccctattcatgagattgcctctgaaaacacaattaaaatttttgtagtctcctctgtaacgcaaacaaagaatatccagttggttgatgctggcagaactccatctgggggacttctttgggaaggcaggagagtggtgggcaggaatgaaaagactaatggtgttctgactggtattctacaacccagtgagcaggggtgggtggctggaaatatggcatgacaggatcttgtgtgggtgtctgtctctggtccctgtcatagactgtaattattaattgaatgactgattgtctattttgtgccagaagctaggcctgatgggaattggggacgtaatcatgaccaagactttcttggtcttaggatatgatgatgaccaagactctagcaaaagagatacatattcaacaaacaactacacaaataaattagaattatatagttactataactgtagtagggtcatgcccttgtaatgtttttgaagggtttctggatatcctcccaatgcaaagagaaaaaaaaattggtcacttccctatgaaactgatcagtatagatgtgtttcccaatctttatctcagtatcagccctcaccatgatacttttttagactattttttgccctaatcacccttccctccacgaaattttaatgtaacaaatattctttatacctgttaatgcactgtaattctttaggggagacacagaccatgttaatatctaatttggcataacccttctcccaagaacaaatgcaatattattttttgttgtatattgcccttgttgagaacggtggtatagatttccctcactgatgggtggaatagcccagggagcaggaaaccttgattcattggaaacagtgtagtatggagtcactattaatgcttgggtttggggatcagactccctggattcagctgtcagctctgccccctcattagtgtaactgtgggcaagttacttagccaccaagcaactaaatttccctgtctgtgaaattggcataaaaattagtgtcttcctgtaagttgtagcatttgatagtaccattgggaaattacagctaacagtaatttattggatatttcaaaacagctagaagagaaaaattgtaagcttccaacacaaagaaaggataagagtttgaggtgatggaaattccagttaccctggtttaatcattgcactttgtatacaggcatcaaaatatcacatggaccccccgaaaatatgtaaaactatgattcatcaattttaaaatacaaaaaataatcgttcgtcataggacttttgtcaggacattcaggtgcttaaaacagtgtctgtcactgttaccttttattcttgtcatcaaataaaagtttaaagttggaaattatgtcttcaagatgcaacagtggtccagggagactaagcagagagagaaagggtggtggctgagcggtgaaaacggccaagtatgtaatgcattaggtaaactggagctgtcccaggtaaattctggcactccaggacctggggaccttgttttttgtaacctctatgtgactctgagtaagtgggctaaatgcacatcaaagggaacccttgagccagaaaaataacacagcatttagaaaaggtacaaagccaagccacagaagttacaccaaaatagcgtggggccatggagccgcccttctaatgacttcggcagattgatgattggcttaaagcaaccagagccctttcttagagatggggatgaggtcagccccaacccctggattcttggtctaaaatggaccactgggcaaatggagattctcccaggaaagcagaaggagaggttgttgttgaagtagccacgcttggccactctttgctccgatacttgccgaaggaccttagggcagttgttccctgtgcgtggaaaactctcttcttcccttctctggttaattttcagtcacccttcagatcaaagcacaaccatccttttctcagtgaagtcttccctgattttcatgagtggatcaaactccttgatttagctttttatgggattgagaggaatagcctcaaatcgcctccccactcagtagcacttattacagttgaaattttacatttatttgtggaattatttactgtcatcctctccttgaggacatgtaaccccagcacttagtacatatcatggctcatagaggacactcaaagtggattttaaatgaattattgaataatactttctcttattttctgaaaaagaaaacaagctacttagcatgtgtgtgttaggaggaggggtacttaccctttaaccagtcccctttaatttaattaccgtttagagctaaaatagcaccaggtactcaagagcgtttgggacgtttgtaatgcagaatcttatgagctcagccattttgacttcactgtctataaaatgcaaaggttattgtaaattccaacattttgccattttgtatacttttaaatggaactggagctattccagtatcaactatcacaaaattcatttccagacgtcagttctttatcttaacttgaacttagaatctgctcaatggatgactccttcttagtattaaaaatttcagcaaagaagatgttgtgtcttgcatcaaatagtaaaattcatgttatttgcaaacatcctttggagaagcaatatgctgcctgggaagagctctagaaaggagccagaagttcagacttgaggccaggttgtgcccttgttcagcgttgggcagatcattggcctcagtttccccatccatgaaaattcatgcattggatcagatgggctttaagactctttccaggatcaaaaaatactgtcaaactttctgaatttgtccatattctatattttttttgagatggtgtcttgttctgttgcctaggctggagtacagtggcacgatcatggctcactgcagcctcctggactcaagcaatcctcctgcctcagcctccaagtagctgggaccacaggtgcaagccaccatgcccagctaattttttattatttgtagagatagggtttcaccatgttgcccaggctggtcttgaactcccgacctcaagaaatcttcccacgtcggcctcccaaaatgctgggattacaagtgttgggccaccacacccggcccataccccatttttattgcaatatattttttcttttagtcagaaaatttattcaaggatattacatccctgggaatttaaagggattgagtcataagtatccagagcaaaaaaaatcataaaatgaagatgtttaggattaagaggttaggtcagatgaacctgatgttaaaattatgagtaccaatattcactcatgtcaagataaattctgactataattctcccaactcttcctttatctcatgactcagtgggtggcagagcatagaaattaacacccccttgctgaagaaatcagatgtcctggaattggacttcagtgcagctgctcagagagagagacagaaagagagaaaggagatacggacagagggagagagaaaaagacagagggaaggaggcggaggaagggaagaagggaaggaagagagaggaagagaggaaataaagaccgaatggataacatttcaagaagttttaattgtggagtgtagggctgcacctaaaagtgaagaaatagggtttgtggacactcttccaattcaaaatcccttcaccaagttccagcctagttgccttttactaactttatagtctaactcagtcatccccaaagtggagtatggagaaaaatttcagaagttctatatttaatttaactctcctttaatttctaattttgatcagtaagatgatgcatgtttataatatatacataaataagtatgcatgtattgaaggtggaaattcaaaatgtttttactgatgggaacttgattgaaaccatttggagaccagtggcctaaataagaactccatattctaacagcaaagggtctcttaccaccaccttgattcctaatgagttacttacataaacataattaataatgcttctatgtttattttttgaaagaaaaatatcttaactttttctgagattttaacacaagtccacattcacagtaaaaatttttaaaatacagaaaaatataaagaagaaaattaacattatgtataacctcagcccatgtttattaaaaagagatcttccatttttaaaattttgagaccattttgaatgttttccctccattttttttaactctttagggtgctgaaaagtcacccaccacttcagctgaccttaagtcagacaaagccaactttacatcccaggagacccaaggggctggcaagaattccaaaggatgcaacccatcggggcacacacagtccgtgacaacccctgaacctgcgaaggaaggcaccaaggagaaatcaggacccacctctctgcctctgggcaaactgttttggaaaaaggtaagtctgattttcaagcgttagagagtcgtccgggcggggatgactccagaacttatttctattgggctaactgttgtactcaacaatgtatggaaggtgtttcttcttcttcaaaatgactcggcttcccattgagtagaagccttctaatgtgttcctaggaaaaatgaaacgcctgtcatgttataaacatgtgtttcgtggggaagaaaaggaaatgaacaagtagaatttttcattctttgagtgacttcatttcatgacagagggttgtggtatttcatgatttcattttccttctgaaatggtttaaaaccctgacttcttcctggtctctttgagcactcttactctggcaagatgaactacctaggggctgtctgtcttcactcctccccagccagacagaatcattcattatcagccactaggtctccactatccttttagaaacctagggtgtccatcagttcaccaccagggtaggcaaacactgtgctctatgacaggaaaagtcaaaccactgtctgattttgttcccatctgaggtctgagtggtgcaaggacagggagagtggggctgagttattctagatctattccttaattatcattgctgagcaagccccagctgctacacatgtgcagagcttttgtctgttttaaatttggccaaaagatgagcaagaagttggagatgagggtgtgggtggaattcatagagctggaaaaatctaacttcagaatttcatcaaaacatctatcgcacttggcacaccatgcaaagcagatgatgaatgcagatgccactgtggtgtcagctttactccgtcgtccagaatccagctggatgcggggccccttgcctgtttgcttcctgtcatacagaaaccttccttccaggttcttcccagaacacagtcttcactatttcataaaaactttggatgatgtcagctgacacattctgttgtaatcctttttcttcatcacccaccattacttatcttaaaatatcttttaccagcaatataatagaagaaacaatttccaagtgaggtatatgtgtatattggagacaagagagaagacttaagtggcccatatctgaataattttagttaaataattaccatgtattcatatgcatattcaaggtgtcttaggaaaaatagagttagcacattaaatttgagattaacgtatgttttgctcaaggttaaataagcatattttgtttaaaaaggaatctaataaaaagacagtattacataaataatggttctgatagtagataaataatggtaaatttgggtcctccaagaagcagacaccaagacagaattgacgtgcaagagatttattggaggaagacatctgtgaaggagaagtaggagtggcagagctaggtacagagagccttcagactacagagagttctgaccatctagcaagaaagagagagaaggaaggagaagtgggtggagaaagcctcaaactgaaggtggtgctaagaaagtcctgaccaagccaatggagaatcatagagtacagattgcctgttccagaggcccacactggaccggaatgaatggcccagtactcctgtcgtgcccagtcattggtaggagcccccagggagaggagcagaagctgaaggcatgacaggtggggctgtctttcttgcaggaatctgagcagcacacttccatggctgctacagatgatacaatatggtaaaaaccacataggtggtgtgccagtggctaaagtttgagaaacactgatgtaaaagctaaaagtttgaaatcagacagctctgactttgagtctcagtttgtctctatgagctttcgtttcctcacttgtaagatgcaaatgataatagtacctatgtcatacaaatgaatacaaatgaagtaaggattaagtgaaataatgatggtaaaacctccaacactggacctagtacaaaagtgcccactgaacagtgttacctctcatctatttcctccgtgctcaggagggctgaagaactaaccaggccgacgtctttatctttctatactgtccagtttgagaaagctgctaaactattgcctcaagtgcttatttaatgtttggaatctacaagagatacagtggttcttctttgaagttcaagctattcctttgaaaaacaatgtcaggacaacttgacattcatctccctaatgatagaatttcatttatttcagtctcactgtcttttgagccactatttagctttatttagtatatcattaaaaatatgaagttaaaagaaatcaaaaaccaaatcccctgtgtctctccttcttgcacccaatcagaagaaaaggctcttcgtcaaagttttacttattcaacaatattgtaattactttatttgtgctaagtactttatttgtgctaagttgttttgtgctatatagtttgtgctaaatactaggcattgaaaaagtagcagtaaacaaatgtctgccctttcctagcttatattcttgtaagaaagcttatattctagcagaaagcaaaatgaggacctttgttttcttttcgttaaattacaaagactatgattataaaatcacccttgtaaatttttgaagagttttgaaaaatgcaaagggaaattctaggaaattcttacattttcttatattttcactgataactaacctaacctctctttcttctctcatttttagttgaaaagctttcaaacatattgattttaaagtttataagcctgtagttacagacagcagaaatgaatttttcccagaacaggctatggatatgaaagtataagttgttttgatttatagtctttattgctagagtagttattattataaaataaaaaaatacctttaaggaaaccaatttcaaattatgttgtactttccaaaaacgtgtttaaaatgcagttaactggagtaaatatgccatttattgttctgagtaaattggattctcacttgctctgtgaccttacataagttatttacactatttgagtttcttttcctcatttgttgaataagaggattgggatacacagtcttgataattcttgtgtatggcaaggcttacacaacagaatcagaaaggttgagctgtgtatccctggacaaattggttgaccactcaaagaccctcctttctaatctgtaaaataaggactgtgtttttctcacagtgttgttataagaaaccaataattgtacatataaagcacctaatatatagtatgtgctcagtgaatgatgtcatcatttcttcaagtatgaacaatcagtggtcatgactaaacacccacgtgtggcttctggtgttaacaccacctaagtacaaaacaagtataaaattcatttgctagcatcaaaagatttgaaatccatttggaggaacatgatacacacacacacacacacacacgcacgcacatgtatttgtaattaataattgatatatttggaatatcttcaaaatatcccttttctgctttcctttgggggagacaaagagtggagtgggaaaataatgtgcactctgaagccacagagacattatcaaatctcagttctgacagttactgactgtttaaattttagtggagcacttaaactcttgagcctcagtttcttcagttataaaattggccaatgacatctatctttcgtgtttattgggaggatcgagtaaaaaaaaaaaaaaaaagaacgccaaatgactgatattcagtgaattataacccgattctgaaacaacgaaatttgcaatttagtattactctgtggagtacaggtaacaaatgctacggttgtttagaaaagggagcaatcagtgtacgtcaaaatagacttaagaacttaaaaaacgtatctgaatcatttgggtgatttgtttcaaatacagattttaacaccttcccatggggattctggttaagaaagtctgggcatatgtctgggcaattatggaagcacttgaaagatgggctgaccaatctgggcttaatagaaaatgtcttagggctactgtgaagttaatggactcagaagagctgtcacatgatcaaaatgatgcttttagaagactcactaggaacagggcaaatgctggcttaagtgttaccatatgaaagtcttttaaagaaaccttaagaattgaatttgctctttaaaggagaggaaactctgttattctagtttctatggataggttatctgctgtttagctccccattcttagcaatataaatgtccaaacaggatcccgtagattttaaactagattttttattgtcactgttaatgaggctggacctcaactgtggatcatccaccacaacatactcattggcagtagaaaataatgaattgaaaaatgatattcctggctccctagctccaggcttcctgttatatagagaacatacagaaagaagggagaagttgccttcatttgtctttatgtatgagcatggaaaccatgcctaatacaaatacaagttaaatgtgagatccaggcttggctcaaagatgctcaaagaggacgctataatacatcagtcagctttcaaggagagtagagacacacctcaagccccaaaggcagatgtgatgtttgagtaaaagcaacagtttattagatgttccaatagagacctagaaattaaagaagattggtttccatttgaatactagcttggaatacaacataaagcacttaacccactgcctgacaataatagcctaagagtggccctataatgtgggttgtcatcactattatctctattagcattactatttttttcagctctgtgcaattgcatctaatgcatgctaagaagctggaggaatgcaagccgacaaagaatatttattaaggaacaaaacatattgcaaggagctgtcttcgggaagccctctggaatctggcctcagccctgtttattcaaaatttttatcagttaacttggacaacgaccaagttaaaagaacatttatcaagtttacaagctgggtgggttcactagtgcagtccaaaatataaacaatatgaatctcaaaataacggcacaatgggctgaagttagtatgacctagaatttttggttttcaaaggtcaacataacactatgttatggtacttgggtcatcaagattttaactgagacccacattgtcccctacaccattccaactttggaacctaatataacctattagttagcagtgttaaaaatgtctgtttataaggggttccgtagcaaacatacatctggcccaagcagacttaagaacatttcaaaagcaacatagaattactcaagaaaaattctaaataggtctagtagatctagccagtgtcatttcttcccaacatttataaaaattgctgttgctaattgaaaatataccatgtgcaggtactgtgctaagtgctttacataaacaaaataaatatcagcaattttcatagaatgctgaacatacatgaatccatgcccacacaaatcccatccagatagttctaggaatccaagataggtgatcatgaatcagcctgggctgccatatgtccctactgggtggtcacccccaagccacaccactgccaccaccacagccaccaaggagatgatccgtgccaatttatcccactcatcactgctgttgggactcccaagcccacgagagttcacctgtctcttgcaaggcagcaggcagaaaaccttttccttccatgttgtgcttagctctggaaggagaatcccgctgcagctgcttggaccccagagtggccccatttggcaagacccactgtaggcatccatacagccctttttctccccagtagacagccagttcgagagtagctgagctggaatgagttgttctaccagccaccagcaccctacccagaaccactatttcccacaagccctggaggttgctgattctggagttcttattgctcctggtaaattctcttgctagggtccatttcttgaaacctttatttttgctctacttcaatacattctggcttgtagaaaagcctatagaccactgtaccctaattccagacatggtttgagttgttcctacccctcccccataaacataccttccaggatctccaactcccatgtaaatgagggtcttcatgtaagtaccaagaggaaccatgtgggtttgactccagccaccaggcttcagtgagtcacagctgtgcttcagccatgattttccctacacaggccttattttattttttccttaaaacaacgctatgagcagtagatagtctaacagtcagcctttgggtaagtgaactgaggtgcagagaagtgtgattaatttgctcaagattgcatagctgaaacactgaatttgtacctgattccacagtgtatggtactctagacttgggttctgagcagattttcttttacatgtgtcaaacactaaagggggatcagaacctgccctcttattatccatttttgaattcttattttaactggatatttcaacaaccactaacagaaggctacacttgcaggccagtgtgcaaatgtacaagaatagttcaaaattatttagagtgactcttggacacaatctgagaagcatttaatcctttacatagtgcatttatctcctgttttcattctataagaagtctcttcttgatattcacaggcatttattactgtacaaacacctgctgatctcttttttaaagaaagacttaaaaacaattagaacttactgcatgttttttatctattgtactttttaatacgtactactatttacagcaaagatgttgatatgacatttgctgtaatgataaggcatttcttttaaaatatatttaagaaaaaaatattaagtaaaaatatatttaagtaaaaagagagtcagtttaaagaaaaacatcaactgaatagaggtggtacatggacaggtcaagaattagaacatggttttttgttcttgcgatagttgactgagaatgatgatttccaatttcatccatgtccctataaaggatgtgaactcatcattttttatggctgcatagtattccacaaaaaaccaaacactgcatattctcactcataggtgggaattgaacaatgagaacacatggacacaggaaggggaacatcacactctggggactgttgtggggtggggggaggggggagggatatcattgggagatatacctaatgctagatgacgagttagtgggtgcagcgcaccagcatggcacatgtatacatatgtaactaacctgcacattgtgcacatgtaccctaaaacttaaagtataataataataaataaataaattaaaaaaagaattagaacatggtatgaaaatcattgaagtttgagagatgctcaactggattatttcccaaaatgagtgctttgctaagtagtctgactttaaaaatataaaatagcaattccttttgaaaaagacaatatttataatgccagacttaaaacatcagaaagatgtggaggtctgaaaccataatgaagatttaaaaaatctgttcagaagcagccccttctattcctcaccatcatctacattggtgatggaatctactccaagttcccagttgcttctgaaatatagtgagcaatgaacaaccagaaactttctagacacaggcaatcaaagataaaaactagtcttgttgcaataaactgggacaggaaaaagggtatgtaaacctagaagtgctgttcttaaataatggaagggttttctcagtctaatataaacagtataatgattcctgaaacttttgtgggccggccttgaggaggtctggctttaaagataccatttggttcattacgtgttcatggtattaaccagtgtctgactaatctcagagaaaaaggggtgcagtttcaagaaagtatctgatatggtttggctgtgtccccacccaaatctcatctcaaattgtaatccccataatccccaggtgtcaaaggagggacctgataggaggtgattggatcatgggggaagtttcccccatgctgtcctcttgatagcaagtgagttttcacaagatctgatggctttataaggggctcttctcccttcgctctctcttgcctgccaccatgtaagatgtgcctgtttccccttccaccatgattgtaagtttcctgagtcctccccagccatgtggaactgtgagtccattatgcctctttcctttataaattacccagtctcaggtatatctttatagcagtgtaaaacggattaatacagtaacactactgctaatttcttctgaacacattacaatttcctgataatcagaagctttcagaaattcagcaatctcttttaggaacatttttgtgcccagagaaacttcactgtgggaagaagataactagaaataaattatgcaatctgaagatctcatctagagagaataattctgtatgtgaagaaaggaattcacacgattgccgaaaaaatgtgtttctgacccttgaagtcatcatagcaggggaaaatttggcttttagatgtaaaataaatgtattaaaaccatttccaccactttctagctgtttaactggaacaagtggcttcacctctctgaacttctatttcttactctgtaagttaggatcacaatacttaccattttggggtgctttaagtgagatgatatataacgcaagatgcctagtgcagaagatacatttgtaaatatcacttcctgtcttcccctcccctggatgccttaaaggaaaaaaaaaaataggacttagtaacaaaatggatatagacagagttcttaacttgtaatccaagaggagagacatagaaggtctatgaatcctgaaattatttgcaaagtatattgtttatgtgcatttctctgggaggagagtccagatctatcaaatgagtctcaaagtggtctgtaacatccaccaccatccatccagaagtttaagaaccaccaaaagaaagatgcaaaaatgaactccaaagttggctaactgatagaatgattgtggctttgacctttgacagaatcgggataactcctatcccacttggggcaggactgtatatgccagaattactcctgggagtaaaacggtgtttgaatgtggatatgtaggactgcagctctctagccttccacagacatgttttagtcaaattgaactttgacctaatgaacttggcctagactgagggctgacgaaagcagcggcccctgctgctggcccctgtgctatggtcagggtagggcttggaccctgcctattgtattataaagcctgcttgctcaaaaggacaattgaacgagtttctctgcacttattaccagaattttcctgagtagcttctttgttttacctaacagtgactctgtattgaatgattaattgcatttctctcttttcatcaactactaaaaaatataaaggcaagtacattgcttacctacagcagttagcattttctgtgacaacgcttctgcttgctccatttgtatcctggctgcatctgtgttttaattttctctttgttgcattttaaaatacataactatatatatatatatataccgttttcatttttgtaagtctcctttctttttagaaggaggtgtacctaggcaattcagtgtccccgaacgcaccccaagactgtgagcccaactaaccctttgcttttatgtaacaattttgttttctgtaaccttttaactctcacttttgtttttatcttcctttagtcagttaaagaggactcagtccccacaggtgcggaggagaatgtaagttacacacaccacggcagaatcattccattctcatcttccgccatgttgtacaattgggcattttcagctctggggtcctgtgttcttgcatgctgccagtgtgattcgtttgttgtagactctcttatcccgtatgtgattagggacgcatggaggataacattggatgaatttttgtaactctcattgaatcagtgcaaaataaatgcaaaatcagggcacaaatttttataattgttatcagtaggggctgaaagagtctactacacgtaagaacagctttgcgcttccttgagggataatgatgctccgccttctgcttcattccaccttgactgctcgttcactcttatttccatggtgatccagcttcttactaactttgggcggtacccagggcagggagttgcatcaggcatgagaacatcttgcagcaacagacgctgagaatgtcggtctcaggttagagcgctgacttgacgggtctacctctgagatagagacgttgagcctcacagttttcctggcttttaatcttctagaggaattgtcaaaattttcaagacagttcattcatccccgaaagggatggtgctatataaaacatcacaaaaacgtagcttccagggagattaataaattgacctcgtgagtttcagacccaaaacaacagctctctgccttgaaagaagtgcgcagtctttgggaaatttttataagtagggataagtgaattcacagctccttgagatagaaaccgaacattatcatgttgccaaagcaaaacttgttctgggtgtcccttatttacttgccataaatagggcgtgtgtttttatttttatttagttatgggaactgaacagatgttaaacatccaaacacgtttctgaaatgttgtctgtgatgtggaataaaaattagaatggctgtgttatgattcttattggaagaaaaatcttgaaattgtgtccggagttggttccttccggtgggttcttggtctcgctgacttcaagaaagaagccacagaccttcgcagtgagtgttacagctcttaaaggtggcacagacccaaagagtgagcagcagcaagatttattgtgaagagggaaagaacaaagcttccacagcgtggaaggggacccaagcgggttgtggctgctggctggggtggccagcttttactccgttatttgaccccgcccacatcctgctaattggtccattttacagagtgctgattggtccattttacagagtgctgattggtgcatttacaatccttttgctagacacagagcactgattggtgtgtttttacagagtgctgattggtgcatttacatccttaagctagacacaaagtgctgactggtgcatttacaatcctttagctagacacagagcactgattggtgcatttttacagagtgctgattggtacatttacaattctctagctagacagaaaagttctccaagtctccactcgacccaggacatccagctggcttcacctctcaaaatctgtttgttggttttactgcccttccttccttcctccttccttccttccttcttttctttcttgagccaatcttagcccagcaaagctcaggtctctcatcattccagaaagttctcatgaattactattttatagaaagtcaaagtttctattcccgcaacctacaaggaggactccacaagacttctttctacgaactttaagtttaaaagctgcccgtaaaatctgtagcatctgttagctttgaggttctgagttttctaaagaaaaactttttggatgtttgtgtgtagttgcttgtttaaggaaccctgtgtttcccgcagctcagatgctaaaatgcagagttgatctctaacaggcaaacaggagatattctattttctactgtgaaattttaaatagaaatataaacaggaattaaaagttaaattatcgacaccaaacgataacacaaaaactgatgatagggacataaaataaggtaaaatatttgttaaataaaataaagaagcattataaaaattgccttaaatgacttaacactgcaagcaacattttgatttttaaggctcaatatttcatcttctttttttctgtttgtgtgtttgtttgttttcttgagacagagttttgctcttttcacccaggctggagtgcagtggcgcaatctcggctcactgcaacctccacccacccaggttcaagtgattctcctgcctcagcctcccaagtagctgggattacaggcatgcgccaccatgcctggctaatttttgtatttttagtagacacagggtttcaccatcttggccaggctggtctcaaactcctgacctcaagtgatccgcccaccttggcctctcaaagtgctgggattacaggcgtgagccaccactcccagcatcagtatttcatcttctgacagcctatcacttggagggaatgagactgatggttgtgacgttgatcccatcatcttcaggccacacctcttgagcctcagtttactcatctgttaaatggcgataataatatcacctacactttcgggttcttgtgaaaattggagatcatgtctataacgtgcttacttcagtgcctgaaatgtaggaggaactcaataattttagggatcagcaaactgtagctcatgggccaaatacagcccacaagctaaaaatgatttttacattcttgaatggttgaaaaaaaatttaaaaagaatattttatgatgtgaattcaaaattcaaattcagtgtccagaaataaagttttattagaacacagccatgctaattcctttacatatcatctatggctgctttgttgctaggcaacagagttgagtagtttcaacagaaacactgattggcagggactttgcaggaaaagtttgccaccttctgcagtaattgttagcaaattagcaaataagagacaacatagtgagtgagcatgtcccagtaatcggtgattttctttcctagtgaaatgatacagctcacagctgactcagtgtccatgtggattgaaggaatgtgtaaaacagagttagctttaatttcctcctctcttaaataagagagaaggcattagtcaaaacaatgtatagtgctctacaccttcacaacaggacaattagatatgattaaccatattacaagagtgctttaaataacgacttctggctaaaatgtggttgagtttattctttaaaatttctctacctacaactttccagaactaatctatcaacggatgcaaggcccacttgtatttaaaaaaaactaaaaaacagagtgatgtcaacatttctcaaagtttctcacagaaagaaaaataaggattttgaagcctgtggaagtttagtgcttttcctagaatgtgcttctggtcctatcagaaataaatctttttttaactcttgaaatgatagaatctttcagttgtaataaaaaaaatattttgcccattggttaattgagttaatgttctaatgaaaaaaatttctttccttccaataacctgtaagaccatggaaacaggtacttctgttgtttatctctcttaataagtaatctctcagttgcaagtgaaagaaaacccaattcaacctggattagaaagaaagtggcctttactggctctcattactagaaagttaaattgctttcaaataaaatttaattcagggctctccttgggttcagccttcttggcctggctacatgctcagctttccaacatcacatcactcagtccaaagtaaatgagctatttgtcaagtagcaaccctgcatgtcctggagtttgttctgtttcactgactgaaatgcattcacatgctgtattcgtcagcttttgccaggttgtgttgcagtgacaaccaggtcccaaattacagtgcttctcaatagcaaagaagtttgttttattttttcttttctcactcatgctacaagccagctatcagttggctttggctaacccatgtggcctcttcctgctgaggtcagtagagaagcagcagtcccttcaataaggacatgcagttcttgttgcagagagaaaatagtggcatgggtgaatcatgcaacggatcctaaagcttctgctcaggcatggtatatgtcatttctacccatgttccattactaaagcaagtcacacatcaatgggcacaggtgtgtaattcatttacaggaaggtagggtaaataattggagaaataatacaatttgccgcatgctgtcatttctaaaccaaccacagtcaaggagcttgaccatgttgattggtttagacctttttaattggcttaatccaaattacatagtcttgaagatgggaaagattgctctcccaaagcaaaattagagtgtgtaagcagatgagagagaatagttactgagtagaaaaaaaaaaatctgtgggaggtctttgtaatcaatcacattaaaagtcctatcaaaataatctttaaaatattctaaaataaaaacctttaatgttaatatgacgttgtgcatgaagtttaaatggacgaaatctatttgccataaatcaatttccaaaagccacagctctagtaaaaactgtataaccaaatttcaagaataagtgtggtataaaatttgaggcaaaaagggaaactcttcactgaaatgtatattgtcaatgttagatgtacctgccatcttcatgcaatgtctaccatatcctctacagaaatcaagcaggggggatttaattctaaaatgtagcgcacatctgactttaattatgtccattcatgatatccaaaattaaaatgtgcagatgcggtcatatgttctaaataggaaacaactttttccaaagccctggcctaggagaaatttggaaaattatccaaataaaaattgaattcctatgtctgtatatgcaaatcagatccttatttagccaagattgttctggatttccacactggatgtcagtggattttccttggctactaaaagccagcttcttggcctgacttcaaaggtagtggaagtctccagaagtactatatttttttacctactgcaatagttgtgttctggagaatggacttgtggcctaggatttatgggttgatacctctcaacatttggaaaggctcagcaagggaaccactggcatccaaatagaattgatttacagagttattgccatacaatctgatcattttatttatgagtaatttttcctccaggtctttgcacacgaagaaagaactcactgcctcaaagacagaatacttctgaacgcaaactctattccttatctacttaagagctattttctatttctccactcttctacccttagttttaggcaaagttgccaactttatacccccaaagtatttgatcatgattagtctaagttagtaatctcattttcttcactagtaagtagcctgggggtaagtggcctagctctgacccatgaaatttaggtaccctgaggtaggggatcaaaatacagatgtttatttggtgcaagtctttggctgtgaccttccttctcagaacattggattgaggatgtgatatctggaattgtggcagctattttttaaccatgaggtaacaaataaaatgatgaaaatctagcatgccaagaatagtggagccaagaacaaagagccaaagttgttagagatattgtggagccactcaaccaaccccagaacttcttgttccatgttttcattggttaagccactattagatacattgagttgccgcagaaaatgccatccttattgtaatgcctatttatctgtggtaagactctggccaaatcattcaattgttcactctttatctatagaatagggataatgttatatttcctaagctgtcgaactatcttgatgctatttataaaaaaatattaaacacccggtacaataccaggcatagcaagaagtagctattaatataatcatctctaaatattggatatgtgcatggtgcctaatccagataattcatgctcatggactaaatagctctaacattaacacaaataacaaccactagcattaattgagtgcatggtgctaagaacttgacatgtattgcctgatttaatatgcagacaactttctgatgtgtatgcaattcccaccgagaacagagaacacgaaaagcacagagatgttgggcactgagcttagatgagggatatagatgtgatttagagcccagcaagttgttctggagcttgtcctctatgaccacgagttagattgcctatatttcagcctcacctgaagggctcttgtggctcacacttacttttcggaaatgcgattgaattaaatcagttcaaaatgtggaaatccatgtccatgctctattgccattctcagtctctgatatggctccagtctccacctcgtttcctaaagatagattggggtccaaagccaacagcccagcagcagacccttcctcacaaataggttttgtttggccaatccagcatttttaatcatttaacatctttagatgggacagcttgactttactttgtcatcatccctgtcactacttttggtcttaggtctggtcaatccatgctgatattctctgccttgcctcctgaggacttttgagtttgtaaccccccaacttccgtttttgtttacaaaaaagaaaatactagaaattgtgtcagtagcttaagaaatttaatttagcttaagaaatgtgatttagttgccaaatgttggggtgttctgcatgctgatttactgatgggcaactccctgaatcaaatggcaatacagagactaagggttcttctcgatttggaaaattcgggtcattttgcaaaccaatggtatgttctgtatgatgggaaagaaaatagtttctcagcagacgatatttttggaaataactaagtccccttcccctaccccctgacaccaagaacaaggctccaagaagctaggggtctggcccagcaaagacaagtgggaagatgcctttgactctatggtactttccagggaggcagcagatgaaagccatgtggtttaaagggccagatagtaaatatttcaggcttcataggccatttgtggtctccatcccatacattttatcttttaaaatatttcttccaacgctttaaatgcgtaaaatccatcaggcgtggtcgcgtgtgctgatagtctcagctacgtggcaggccaaggtaggaggatcactcgagcccaggagttgaaagccagcatgggcaacgtagcacgacctcatttcttaaataaataaataaaattaaaaggtaaagactatccttagcccaggagccacacagaaacagttactgagctggatttggtagtattttgccagcccctgcctgaggaaacaaaggaaattaaaaaacctctcctggccaattcactctgtcctgtggcagggaacaacacaaatgcagaaactgtcccagatgtgactggggccctgtacaaatggagtgaggcactgcaaaagaacacaagttgagagcagagtgtggtagatgggcccttccatccaagccgccacagacactcagaggcagaggaaatcgagctcactaggtacagtggccagggccgcgaacaacttagccatcagtttcttgccaagttcatttttcttctgaaagcataaacttcaattaagtgaaatggcaaatgactgttctagggaaaaattagatatcgcttaatgaggaagtcaattaaattcagtggtttttacactctcctttctacaaagaggacagtttctttatagttgcaggggaactggaaagagaactggaagctgtcatggttaccgtctctaacgttggactcttaagaaaatgattattcctggtttctagacaggccaaatgtaattcacctacgtggcagattaaagaggtgggcttactagatttgattgggtattgagcatgctctgaatgacagtccccaaaaaggacctcttatctgttcttccccttggggaagggattttgccacttccatgtcaatgtggcagttgagcttggaaattggtgcgttgtacaacataagcattacttctccaagatgtgcctgtgtagaaatggtcatagattcaaaactgtagctactatgtggacaggggggcaacaaggaccccactttgtaaaacatgttttgggggaatgttttgtttttcattttcttattacctggcaaaataatccaggtggtgtgtgagtcaccagtagagattataaagtccaaggaagtagaatcagccttacaaacagtggacctcaacgaaggagatgctgcacctgaacccacagaagcgaaactcaaaagagaagaaagcaaaccaagaacctctctgatggcgtttctcagacaaatggtaagccccttacttccagtataggaaacctaagatacctagagcggcttctgggaacaatgggctcatgccacaggtagtaggagacataattgtagctggtgtgtatggaatgtgaatggaatatggattgcatagtgagaaaattccctttcttccttctgattcaatcatacagaaagtctcagtttattgctaatattctttaacccttctttaatgcctgctaacactttttaacaaaaaaagaggtgcccttgggttggaattttttttatttcaatagttgtgagcatacaagtgatttgagattacatggattagttctttagtgtgatttctgagactttagtgcacctgtcacccgagcagtgtgcactacagccagtatgcagtcttttatccctcacccttctcccaaccttctcccctgagtccccaaagtccattatatcattttttatgcttttgcatcctcgtagcttagcccccaattatgagtgagaacatacagtatttggttttccattcctgagttacttcacttagaataatggcctccagctctatccaagttgctgcaaaagacattatttcattcctttttctggctgagtagtattccatggtgtacataagccacattttctttatccactcattggttgatgggcacttaggttggttccatatctttgcaattgtgaattgtgctgcaataaacctgtgtgtgcaggtgtctttttcagataatgacttattttcctttgggtagatacccagtagtgggattgctggatcgaatagtggatctacttttagttttttaaggaatctccacactgttttctatagtggttgtactagttcacattcccacctacagtgtaaaagtgttccgttttcaccacctccacgccaacatctatttctttttttcggccttttaattgtggttgcgtccaaattttggcatacaacagcatctaactggaagttactattattgcttactattatttatttttaaagtttccttctcttggtggtcaatgatactgcttttcttattatggtaatgatatgaggttttctttgaattacatttgtttacataaagaatatcaggcattttaaggattatgtatcaaatagtccaagttatataaagatatggcaaaaattctgaaggtgacgtgagtgacacaaatttggacaaaactagcttatagataaattaaataaggaaatgacaacataatattccaatagtgaaatatataacttagttgatgaattagccatgcttttaatttgtgtagaatagaaagaatgtgatagatatatttactgtttataaaaagcaatgcacattaaatgactaaacagccaggagcttaaataatataatgcaacaaaacctaaatcagttggagaacaaaaaacaaaaatgcatgtaaaaggtcattagtttaattctcttttaatgaaaaacaagaatttcattatagtgtgactttattttcaggagtatttggagtttaatcctttgagaaagcaactctctaatttcacaggctcaacctgttaaggaattctatctagcccacaaaacaaaacaaaacaaaacccttgccaatgggaactgaggcatattagaaataattatgttagaaattgttgacaggaatcattttcttttcctgttatattctcatggagtaaaaagtgtagaatcagttgtgggcggcccatatggccaaaaccccatctatctcattggccatttgatctgcaatttggcagtgaaaatggagattaagacttgagattttttttaaaaccaatttttacatgatgccaggaaagaaaagaacatttggcctgtttccggcaactcatctaacttacaaatgggatccccaaatatctcatcataatattgagagtgatcagcttttccatttctggatggaattgagaggtacagaaaaaaaaaacagtaaatagaatgatggtctcttccaaataaccaacatgaagctccttcatttaaaacagggaaaagtacaagaaactccaaagaaagcatgaaaaaaaaaaaaacctctaaaccactcacagcatccatctaaaacaaattcttaaattctaatgaggtctcatattacttaaatttatcccccagagctatctgttagatgctgtttgggaaaagtttttggcagtagaaaatgggtaagtctaaattctgagggaaacaaattgaaaagaaaagcgtcctttggaatcaattcgctataggatagggatgaaggtaggtgaggacacacttttccccagcaatccccaatggattcttagaattggattccatgctgtccattgttcttattaccagttgcccacgaaaaggcctgggaacacgaacattatctttgcaaaatttaaatcctgattgttggaatttactttaaaattccaggtattctaattatcgtctttttttctgttttgccttcattacaacactatatttatactgtgattaattcaaataaacaaatgaagagttttccagcttactaaagtccctaccactccctattgccacacccagtctagctcactcatttatgttaccggccctttccctgtgggtatttgagtttgcaatccctgatagagaaccgcctgattctttagaacaacttatttgaatcatattgtctggatttatcatactcaggttaaccattgctcaatggatggacatgtggtatgttttcaactttttgcatttcatgcattcactttttcaacaaataattattgagtgtccactatgttccaggcacaagggatacaacagtgagcgtaaacaggtgcagtctcccccggcggagaataaaacagacatttagttttaactctatcctcatattcagtgagcacacaccaagtgtctcacccacgttatttcagctgcttcgcaagcctgtatgaagatcctcacacacttacttctatgcacatgtgttaatgtccccattgggtagatttctggaagttggctctagcaatcattcttaggaaatactttttagtaacatgttcatagcttccaaactgattcaaagtcttcggatttatgcaggaaagaaaaaacctgccctaacagcttgaaaatagagacaacatctggcccatcgctaagggttttttgagcggttggggatgttgagccaaataaataaacgtttcagacaaattttggatattgttagcaaaatatcgatttgtttaaataattgatttaatggaagagagaactcagctgcaaaacctatgctttgattcaccaaatcattgattttctgctttctatcctttgcatttccctcctttttcttttttttttctttttgagacagtctcgctttgtcccccaggctggagtgcaatggcacaatctctgcccgctgcaacctctgcctcccgagttcaagtgagtctcctgtctcagcctcccgagtagctgggattacaagcgtatgccaacacacctggctaattttgtgtttttagaagagacagggtttcaccatattggccaggctggtctcaaactcctgatctcaggtgatccacccgcctcggactcccaaagtgctgggattataggcatgagccactgcatccagctagagatctttttctctctagaaatttactgctcataaaaataaaaatagaggccaggcgcggtggctcacgcctgtaatcccagcactttgggaggccgaggcgggtggattacgaggtcaggagatcgagaccatcctggctaacacggtgaaaccctgtctctactaaaaatacaaaaaactagccgggcatggtggcgggcgcctgtagtcccagctactcaggaggctgaggcaggagaatggcgtgaatccgggaggcagagcttgcagtgagctgagatcgcgccactgcactccagcctgggcgacagagcgagactccgtcttaaataaataaataaaaataggaaaagtatcatttttaaaataactatattttagggaaaggaaaacagaatcatgtaagtcctaacagtgcattcaacacatagagatgtagcacttcacagaaatcctgcgggctcctgcaggattttaaacaattgcgaggaatatctaagacatctgtcatgccctaaataggaaaagattcttatacatattaattcagctgtatgtcaagaaattgaatatttgaagtgctggtgtatttttataaagtgagtgggtagaatactgcattcatgtgtccacaaagcaggtaggcaaatgaaaccagaaaggtggtagatctagatacagttttatacttcgtcaatattaataacaccttacacttgaaaatgctttcctcctccaaactattttcacctaccttatttcatttactcctcctcatatctttctttggaccattagatttgtaagaaaatctttgttggaataatgttctcaggcttagagaaatactgtgagctttaataatgggtaaattaaaagtccaaatgaggaggcagccatgaaatcagagggttttttaaattaattacattcaatctagtaagtctaacaaaatctgttgaaatgtactattggaggtggaaagagggtggtctgtgacggtagttacaaaacagaaaaccgaaagtcttccatatgaaattcttctctgagcattaaaatgttaatactgatttgctctttaaggaaagatttctgaaggaagcattaatttggtcaattcctgtccctaccaatgacttgcattcctttctaccctaagagggtctctgtagtcgttcagcacttttcagttatcggcagtaacaacaatgagagctaccgtttatttattgtctgctaggcactttgcacgcagtatctcatttattaatagagaactctaggaaacaagtgctctctctgccccatgatggacataaggacacagagactagtgagtatttatgggatttttccacggtccgggagctggtaagcgggagagccagaattccaactcagtttgttgttttgttgtcattttgttgttctaaagctcaccctttgactcatgtgtaattgctgcttcctgtgcttctgcagctggtattctcagaaaggatacgaaggtagaacaaccacatgctccattgttgtgatttctttagtaatgtgttctatggaagtaccattttgatgcattgagctgttgcacttacctaaaatgacaataagggaaaggagaagaaaattaatatatggcttacttaaagcttgcacataggttttctaaatatatttgtcactaaaacaaaatttaccttggctggggaattttgcctgactagtccaattccatttcaagtgagcattgtggtaaaatactaagctcagatccattacctttgttgatcctagaaattttcagtagatcccattcttggatttgttttcatgagactggtctgataaacaatattgcagatatagtcaccatatattaaattttcagcccaattctttttcttttaaatgtcaattgtgtttgaattatattgccatcaaaatacattaacattcccttcaaagaaatgtgaactgaccaccaaacacttttgctagatttttgaatagctaagtgatatacattggagatggttcaaacattcctcagagtatcaagctataggaatgcatgacaagatgaaagaaataaaaaatgatttcattaatatacaaggcgtgaatgccacaagtagattccatctcaacactgcaggctgaatgccctgagatacttcacctttgactgtcatgaataaaaattaactccatgaagaaagttgctcaatatcacactggaaaatctctgaaattacttcatagtctttaaactgttcttcaaagtattaaatagtctctggaagaattttagtctctttaaacagtaactttgctatttttgacagctggaaaaaataagtttctatgtttatggttcctttgaatacagagttcaacatgaattattctgatttgtctctgcaaagaaaaaagaaagaagggtagaagaaaaggagggaagtgagggagagagagaggacgagaggaaggaaggaaggaaagaaggaaggaaggaaggaaggaaacagttgttattaataataactgctgctacagaagtgacttcagatggatttaataagattctaagtgtaaacccaaacttcagtcacctttgcatacatacagctttacatgcctcaaaataagcaataaagaaaaatcactgaaaagtttgagatactctctctctctttttttttttttttttttttttttttaagaagttgaactttgttgcagtaatctccctgacagcctggaggtctgttttcatgattcatgatgtcagctgagatcagctgctgtcaacacagccttctgattcaatcccaattcttctccaagggctctcaaagaaatggggggaaagaaagcaaattgaaaccttaaattgacagagtccctaatgaatgccaaattgaaacaactaacgggaagtttagaattcctgtctcctagggggcaagtgagagaactttattctctagaaggtggtggagtgctcatgcgtgactcttcatgtccattcggtttttgcctaaaaagccattttgtgcatttgtttgttttttgctgctcaacattcccaaaggttgacagatatgatccaaagccacagtgtaaaggccacttgggaatgggcttgagtaggaagggctcttacgacacagcccgaatttggaggctgaatgaaatccttacgtgtccaaagctttgggtgtgatgggaaggctgacagagctggttatgaggagggaagaaatagccaacagttcatttctttttctaaaccttctcaagcaagactggcctttgtagaacaatgcacaaggcacggaggaaggaaaaacccactttccatgtagacagatctaaattttatggagaggacagtctgatctttgtttgtcaatcttagtgaaacctgcaccaatgatgttcctcagtacacggaacttccagacaccacctctttcacactaagcagtatattaaaaagagcacaacccttctgtaatcccagtgctttgggaggccaaggctggaggatcacttgagcccaggagctcgagaccaacctgggcaacatagtgagactctgtctctgcaaaaaaattttttaaaaaatagctgggccaagcacagtggctcacgcctgtaatcctaacactttgggaggccgaggcgggtggatcatttgaggtcaggagtttgagaccagcctggccaacatggtgaaaccctgtctctactaaaaatacaaaaattagcagggcgtgttggcaggcgcctgtagtcccaactacttgggaggctgaagcaggagaatttcttgaacctgggaggcagaagctgcagtgagccaagatcatgccactgcactccagcttgggcaagagagtgagactctctctcaaaaaaaaaaaaaaatagctggacatggtggtgtacacctgtagtcctatctatctgggaggctgaggcaggaggattgcttgaccatggaggttgaagctgctgttaatgatgattgtgccgctgtactccagcctgagtgacagaatgggaccctgtctcttaaaaacaataataatatcaaaaataaagaagagcacagttgactcctgatgaggggacatcccataaacatccacatttgagtttggtcatcctccatcttatccaagcttttatcattttgtttaatctaacattcagcaacttcatacagtgaatgctcaataaacgtttattgattgagtggtgcctcttgccttctaggggcagtatggggaggtggtttagagtgtggaatatggagtcattgcctgctgtccaacactggcactcaaacctgctagttccatggtgatgctagtatctttgagcttccatttccttgtctgaaaaataaagtaattccactatcttaaggttctgacataatgaataaatgaaataatgcaagttattatctcatttagcacaatgcccagcacttagtaagcactccactaaaaattatccttcataaataataatttgtattatctctaatgtgaacaccgtagctcagacaacaaagatacataatattaatcagtcaaaaagtatttgagtgctttcaatgtttctggctgttcttagtgcatgtgttgtggattcttacggtctgctaagagaacagccatggccataaataacagtggaatctggagtcttcctctttgccccatatggctgaaaccctgctctctatactcctcccttagctgggaagaggagacattaagcagtgatcaaacgtgtgggaattagacctgagtcaatgttgttgataagaaccgaacattttatcaccaggtttcttaggtatcaggcactaagcataggacattactaaatgcaccgttaaaaccacagaccccagcatgagtctgaacctgtatatggccaacttgctgagagcggtggtactcaaactcagacaatcctcagcaccacctggagagcttattaaaatgcagatcattgagcctctgcctctgaaagcttctgattgattagatccagcctgggtctccagaatttgcctttctagcaagttcccaggtgatgctgaagctgctggtcctggaatcatacttctagaaccattagcttagagtgtggagtttaaggagtcaagtccaaccccttttatccctgtcactggtgttgctggctatagggggtgctaaagggtggaaaatgaaatattaaacaaaactcatatctctatcaaggagagaaaaaaaaaaaaacaataaaacacccacagcctaaatattcccagtggaaggctactcatgggtcaattgttcattcagtcttcatttaatatgttcaactatctcctgcttccaacattaattggaaccgtcatcatttatctcagaattgcctaattccaggatttagtacttttgttgttatttttggaggccaacacttgaatttaattagatctggttagaaattgcatggaaatctctatatccaatgagtaacatgtttccagttggccttccatttgtcttgaccccaaacctcaatgataaatgactgagatcatccatttcagaactttcttgcattctccacgtcactgtacttgtggctgaaggccattgtctgtttgttattttagtcagtgaaaggggatggagggatcacccactcagaagaaataaatgggaaagactccagctgccaagtaagtgacctcgaactcagtttggtggtgggattagtggtgtattctcacttcttcacagtatacttttcaataaaattctcagccacagccaactcatttaatatctcaggattaagcacctactatatgccaagaactatgttggggtctgcagacacaagcatgaacaagctagagttcctcagctttatcctatcaaaaaactttcacacatgtgcttccctcttttctgcattaaaaatctcttctcacccttcactttttgccataaatgtcacctcttcaaaaagaccttccatatctgcctctcataactacatattgttcttttatttcatagcgtcatcacaaattgtaataattcatttatctcccctgtttcttctcatgtctgtctggaatgtctgtggagcaagaagtctccttcttctatttctctatcaccttgcatggtgtttggcaagtactagaatctatgtcttgaacagaataaagacatggagtcggggggtcacacagtttgctttcattattttctttattctaaagaaacatagctatgacatatttataactacatgtgttcctttttttaaataggatcatgcagctgcactctttttttaatttaaaaatacacctccacaaaaaatggcatcaaatattcttctagtagttttgacaatatagagaagtggctacaagaatgagtggtagactcaaactgtctggttcaaatcctggctcagccacttttttttttttttgctgtgtgacttaggcaaattgccaaatctgtcagcacctcagtttcctcatctatataaaggagctatgaaaagtacttccttatggggttgtcatacttagatgaatcaatacatgtaaaacacttagaacatttctggtatagagggctcaatacatgttagctactgtattagtcagcacgggctgccataacaaaatgccataggtggttgctttaaaagcagaaatttattttcttgcagttcttgtggctggaaaggataggattaaggagtaaccaaatcagcagggtttggttcctggtgaggactctcttcctggtttgtaaatggccaccttcttgcttgtgtgtccttacacggcagagagagaaagagaataagcttgccaatgtctcttcttataaggacactaatcctattggggcagggccccaccctatgcctttgtttaaccttaattacttcctattccaaatataatcacattgggagttaaggattcaacatatgcgttggggtgggggcacaactctattgttaacagtgtctatatgttactattactattatgctgctgatagggaatttccatcttataatgttgcccatatcacactcacaaatggacggtaatgactgtaaatatgtttttgtatttttatttccataataattggtttatcctacatttttaaacaggaaatatattgctttttactatactcttcatatttaagcttttaagacaagcttaaatatgatggtatattttgtctggaattttacagtgaaggaattatgccaataatcttggtgattctaaaattggaatgacatccatacaaatccaaataagctagaaacatcccacctaggagtgttttcagaatccaattgggaattttattttccggagccttggattcagacttgagaacactggtgtgtcctttccatttttagctaatttaattctcacagcaccataaggtgtcatttcttttattgctcccatagagatgaggaaactaggaggtcagtttatccttggtcacacagcaaggttatggtggaattagaaacaaaccaggtccttctgactccagacactgagttcttagccactcactgcatcttaaaatcttctacacaacaaaaacagttaacaaggcatttgaactgggatctctggtttctggcctttctgaagagcattgtggtgagagtttctgtttcattctaaggagagtatctgctctgggatatctattgtacttggacatccatatcttagcatttgctgcaactctgacagttggggtctgccagaagtgttcaagacatatattacagaagagcttctcaaggtacactggatgcctgttgcttctttctccaaggacttctgccctctgaagagcaccggtggaggccttctggaccggggagtctctgctgtttgtcttcccgcttacttctaaggggcgtgcatgattcactggtgtgaaaagaaagttctcctacagttgatgccttctccatcaaagctgctaccttgttgtagaactttttacctgggtacagtacataacttcatgaatcatgcttatacacatgtatccggtgggtcaagtgtgtttgccagttgccacaatcagggctttaaaacttttgaagtcaatatttaaaagttgacattttgcattttttaaaatttaatttcaaggttgtcttgaaacaacagaagctctgaccacactggggctgcaagcctacgtggtatctcttggctggatcagagcaactgttgccctttggacagggcatgtaacattcagtctcccctgctctaaattttctccccaacatcaaagccagccttgcttgaactggtgcttttcttatactggagaaatatttttttggacctttgttgcttttgcagctggagaaataagatatccacatggttattcttaccccagcctgcatttactagatttttggattttacagcctcatctcatcaaattattggaagcatgtgggattgtaaacctttcagtttgacaaaaaacgatatacattccaaactaataaaacaatcatctcttttaccaccatttcatgaagcaaaaggacaatttcacaccaaaaattagggtagatgtaattatgaagaaaagaatgggcatccccaggaaaacactcgcatgtggttgcaagtgggagtagccccttcaaagctggcttaagcataaaagggctccaggaacagctagatctaggaggcacgcatgataccatcaatgcctggtccctctctctctctctctctctctctctctctctctctctctccatttctcagctgtgattttctctgtgttggcttccttttcggggagattttccctagaaatattggtggttctggaagctccagtcttacattttcacagcttcagatctaacagaaagggaaccagcctctctctcatttcagcaaagctctgagattagctccagtgttatctgcatttggctatgctgagccaatcacagctggccaatcatatacaatgctctgattagtcaggcctaagtcacatgctcttgtctggaggtggaaatagtttgcctggaccacacggagtagatgaggaagaagggtgtttccccaaggaaaagccaagttctggttccagaataagggataaagagtgctttctgggatagcataaaatgtattaatgaattattagataactaaataaatgtccccaccatgacttcataagtgcacattttacctttttttatattcatttcacctaggattcatgaaaatgtagataccacccaacatttgaacatctctgttttaacatatttattcccttgctattgagagttgtcctgcagccactaaaaatgtactttgtttgaaattgctgtagacatcagactccacagaaaagactatcacaccgccagagcctgaaccaacaggagcaccacagaagggtaaagagggctcctcgaaggacaagaagtcagcagccgagatgaacaagcagaagagcaacaagcaggaagccaaagaaccagcccagtgcacagagcaggccacggtggacacgaactcactgcagaatggggacaagctccaaaagagacctgagaagcggcagcagtcccttgggggcttctttaaaggcctggtaggtggattttttttgcctcttctttctgggctctctccttccccaacaccatctgccccagtcagtttttcaaattctacatgtggctcttcacactgggatcccgggtctatcactcagggtttttgaactgctatgtgacttccagcaggttcaatccttctccattttacaagctgagaccttgagcaaattattgcctctctgaaccagattttttatctgttcatacataatgatgcctaactcatagagttcatgaaacaggtgagatactgcatctagtcacctagcacagtgcctgagacctagggagcaatcagcatgtagaagtaatcgtcatcatcaccatcaacatcatcatcagttttgttcagtgtcttgtgcgtagcagatgctctgggtaatatttgttgaatgaatgaatgaatgaatgcattattggctgattttatttacattatattataccaatttgacgtgttaaaaaaattagacaaatcaaatttaaacacactttatgttgtgagcaaagaacagttcatgaattgggcagcactcaaaacccaaagaggttcagagagcactgcccagtggcatgagcagtaagattttataggccaaacatggaagcaaagtagaaaacttatctgattgggtacaatgaggtgtttgccttatttggtcacgatgtgatgagttgtctgccttatttgggaatggtctgatcaattggttgcctgtgattggctgaagctcagctatttgtgattggctgcaacatggctatttgttacaaaaaaaaggatactcataaggtaggttttggtttgtttacttactaaatgtggttgcagtttgttacatagacactgggagtaaggagactgcctcaggctaaaggcctcctgcttatttaatttaacaggggtataaatgcacaattgtgttactccatggactatagaatcaatggctgctagatgcagaggaaatttttttactgcttgcaattttaggcagactggtggggaggtgttttagatgtgcttattttactctcctctacaaaatggaagcccctcttcaccactggactcccagctccatgagggcagggcaccacctttcaggttcaaggctgtatctcaaggacttgaaataggactgcataaacagcaggtgcttgatagacaaaggaatgaatggatgagattaaaataatagataccaaaatatgatatataaagttggaatacattacttgaaattgttacccttcgataaaacattgtactcaactttaaccacacttaacaatttctacttgcatgtttaaaaaatacccactttgagaatggagacactgaaagtgggtatccactaatcatttgatttacatatggaaaccactgaaatttcttcccttccttccttccttttttcccttcttccttctttcatttttcttccaaaaatatttattaagcattccatctaaagcacattcacactcatagcttctctctcctatcccacaagatgtaatagttccttattagcttcttctttctgggtgtagtgcagtcttcaaactaatcatgtagtccttgcagtggtttcattgatgtgaggaaggcagatgttgatgtaaagcaagaatgccagtttgtagccctgagagaaggacttcacccaagtgggtgaggctgtattggatttgccaacgcaagtcttctcaaaatgtactgtgcacacgaatcacccagggatctattaacacacattctgattgagtagttttggggtccaacttgggatgccacaaagctcctgattgatgctacaaaagctgctgatccagggatcacactttgagtagcaagttcctaaaggaccaggaaagatgttggggaaagtatttggatttcttgtagtttacttcttttgtttttttgagatggagtttcgctcttgttgcccaggctggagtgcaatggtgcaatctcggctcaccgcaacctccgcatcccgggttcaagcgattctcttgcttcagtctcccgagtagctgggattacaggcatgcgccaccacgcctggctaattttgtatttttagtagagacgggtttctccatgttgctcaagctggtctcgaactcccgagctcgagtgatccgcccgcctcagcctcccaaagtgctgggattacaggcatgagccaccatgcctggtcttagtttacacgtttttaacccatgatttattcattcatttaaaatgaacaccacccagggaatgatttacactgtggcttctaattattttaatagaagccagcctctacaataggtacgaaggctgaaaaagaaagatggtatggaaaagttcagatgatttctaataatctggtcattcacttaacaaatatttgtagaatatttagaatcctggcagtgagctagaccaggggtattaaaaatgcaacccttgtttctataaataaatttttattggaacattgccatgttcattcatttacatgttgtctagctgctttcacacaaaaacatgagggttgactagttgcatgactagggttgactggttgggttgactagttgactagactgcatggctcataaggcttaaaatttttgccaactggccctttgcagaaacatgtgccaagccttgaactaggcgctggaggtatattcagcaaacaaaggggacagggtccctgacatcaggggttcatattcgaaggggaagcatgcagctaaaaagtattagtagataagtttaaaaacaaggttaaaattattaaaactacaacgttaaaattacaaaattaaagacaaaatttgccaacaaaattgtaggtctgggagatcactgagggaaataaacaaggtcccgcgatagagtttgcctgagtatggatgggggggtgtgtgctacttttgcctgagtgtgtctgggggcggggtgtgctacttttaatcggtggatcccaaaattgtctctgaggagatacatctgagatgagacaggaaaggttaaaggtgccagacaggaagagagcaaggctctttcttccaggaggaggggacagccctggcaaaggcacgggggtgggaatgagcttagtgagcttagtacatttcaggaagagaaacaaggccgtggttgctgagggtggagaggtagggtagggggagaatgatggaagtaagattggagccgtgggcggggacctcctcatgcaggctgtacgggctgtgcaaggaatgcagacataatcctatctgagcagggaagctactcacagatattaagtaagaagtcttggcccctgttgataacattcgaagattttattttgctgctgtggtggagaatggctgttgaaggtcattaggagctagttaatacaggtcatatttcttgggagagctgatggagattggcctggtgattcctgaagaagtgacaagaagtggacaggtttgagacactaattacagttctagacaccgagtccctcctctgggaccacactcctttacagacctcatctctttaggatggcagcatcccttcaggctgggactgcttctgccacacctcccagacacataagccaggcctccaagaagctgtgtcttttgctgaacattccacaggttgtcagagacagaggcagcattcagctcaggccccctagaccccaagtcctgcatcgtcccagtgtcacaaggcctccagcaatgatggaggacggaggggggcttccctgccgctttccaaagaccaagcctcgaagactttcaagctggacacattccccagggttgcctgaccgccttcctgggaggggaatgctggcagccgagcctgtcaccacccacagaactattgtggtgcctgttacccacaggaaatgagacacaccgcaggccgatccctgcatgatctttgtctcacagtgacgtcctcgttagtcaggtccttttttcctccttctccatcatgctacttgagttctaactgagagcaacccacttggttttcaaaaatctgaaaagaactggaaggaagcccttggcattcacaaagtccaactgtttgaaaacattttcctttctttttgagcaaagggacttttttgtttacaaaagaaaatgtcacaaaacctgggtgtgtgtgtgtgtgtgtgcggatatatgcatatacgcacacacagacacatatgataaaagtgaaactattctgattgatggaagactgggtttctcccttcccctaagcaccacttctttgatggccctttcccagccttcccctttcccattttcatgagcccctgaagtgctagattgtgtgcagcgcaatctgcaggcaggtttagcaggtgaacaaatggaggcttgaaaagggaagacatctgtccacactggtgtgggctgaaccgaggcttgtgacaatcagcgcagtcactgcaaggagcctgagaccgagggttggaaagagcgggcagtgaacagaagagagccggggacaacaggtgagctgagggccagattccaagtcaaagtggccaggccgttaccgcatgacctagtcctaggtcatcttggagcctcagtttctgcatctgtaaaatagggtgaataataatcactgtccacctcactgggctggagagagaacaggtaagagaatgggtctggtttggccttgtgaactgtgacgtgtagtcctggtatataaggcaggaaaggggttgcatttatgtctctggcctccaaggtggagtcccagtgaggccagaagggcatgtgtatgtatgaggccagtgagtcaggtgtggtctgtggctacctgaagggcaggtgcccacctaaagggggtgcccctcctcagcaccagccacatgttaccttgggggactgcagacccattgtggcaggacctgtccatttagtcaagagaaaataacaaaggtggagaatttttaagagcaaatacctaatttttaaatgccagcatctaatttttttttaataaatgaagaaaatgcttgtacaagttcatctattgcaaagttcaggcccgtggcagccacttggccatctgagtttgctgtttagtccatcaagccccaagatcaagctcatggaacctaaaggatggaaacctcggggaagtaagctttaatagaggtgagttgactgggcagggtggagcctgggtgaaccaggatccacggcaaggcacgctgggcaaacagaggcaggatggatggctgccacccgtggccagcctgagaccaggctctagacacttgcaagaagcttgttcctggacttgaacctagctctcatctagtggctgagtgagcttggacctgtcatcttgctgagtttcagataccagatcaatgaagtgaatggtgctgacgtcacagggttagcatgaagatgaagggcagtagtgtacaatgcccttagagcaatgcttgtgaggtttaactagtcaggaaaggctattttgtgagtattatttagttagcccctgccctgggttgtaaaggtgcagagatgagtcgggcaccgctgtgccatggggagtttgtgctctaatcacagcaacaagcgattacaatgcacggtaaatggaggggttggggaatggcctttacccagctcagggttcagagatcggggacagaagccggcaccccacttactggcaggaatttgactgaagtggcttgggctcgctgggcttcagcagcctcctctgtagcctgagagcgacagtggcgtcaacctcgtgggctgcagtgaggaccgggtgggatggcagtctaagacctcacacagatgaggcagcaggctctcagcggtgagggaccggccagaggtcatgcaaccagaaagggatggagcatccccaaacccacagctgactcctgagcccaagcttttggtatttcacggtgtcctggtcatctcttgatgccccaaaactattaataacacaatgtattgtctgcagtaggtcctcaatatatgttgttgaatgaagtagtgaattcaactaccaccactaaaaataatcataactcttttatcacacttactgtgtgacaaagattgttcaaagtacattgcatatactaacacttaatcttcaaaactaccctgtgaattcccattttatcaacggtaaaattaaggcttaagtagagggttaagcaatttgaccaaagtcacccagctaggaagtggcaggtctggcgttcaaagaccagcaatctgattccttggtaaattacatgaaattacactacactatgtagtaaatacaatatactatactatgctagattatacagggcactacacagtctatgtactatatacatatactatatatgtgccctatatacatcatgtatactaaactacactctatttattatgctataatacactctatatactatattacatattatacgatatcatgtatattctactgcattaaaccatatgacactatgtacatatactagaccatacatactttgtgatagtacattatacttccctttcctatactatatactatagtgttctgtatatatcatactatattgtacattatgctttgctatactttatttactatactatacagtggactaaactatactgtgctatagttaccatacttgactatactatatatgtatactatatatactataaaatatacactaccctatattatactatcctatattaccttatactacactatactatctatatatactatgctacaatacgttattatactactctatactatactctctctatgtgtgtgtgtatatatatatatatactgtatacaatatataaatcttatactgtactaccctatactgtcttatagtataaaaggaggcccacaattgatccatgcagcaaggtggatgaatcgcacatccactatgctacatgaaagaagttagtctgaagggctgtgtatactctaggatcccatgatatgacatcctggcaaaggcagaactctagggatgaaaacagatcggtgcttgccagggtctgcggtggggagcggttgaccacaaaaggcacaagaaagatctgaggggggacagaaccatgtgacatgttgatttggatggtggttttagggggctatttgtgttggtctaacctcatagaaccaaatacagaaaaggttaactttactacttataagttatacttgacagaaacggtaaagtaataataataataatagtactcaggctaggcatagtggcttacacctgtaactccatcactttgggaggccaaggtagaaggatcacatgagcccagcagttcaagaccatcctggacaacaaattgagaccccgtctctacaaaaaaaattttaaaattagctgagtttggtggtgtgcacctgtagtccaagctactggggaggctgacgtggggggatcatttgagcccaggacttcaaggctacagtgaacatagtcccaccactgtacttcagcctaggcaacagagtaagactttgtctcaaaaaaataaaataaaataattgtatctgcctgacaacattccttcacccacattcagtcaatgttaaggctaggtaccatgtgctaggaacctgcaaggcactgagacacgcagaatccttgcagcttccaatctggtgtagaagacagatgttagacaaataaattagataataagatcatttcagagagtggtatgttctgagagagaataaaatagggtttgggatggggggttgggggaaggatagcattaggagatatatctaatgttacatgacgagttaatgggtgcagcacaccaacatggcacatgtatacatatgtaacaaacctgcacattgctcacatgtaccctagaacttaaaagtataataaaaaaaaaagaagaaaataaaacagggtggtgaacctagatggtaactggggagggagctaaagtgaggtagaattagtaccccctaggtactaagtacattataagcatgaactcactttatcttgggaacaaccctctgagataagtttgtcatttccattttaaagataaagaaaccaaagcgcaaagagatgataagtaatttgtccaagatttcacaaagctagaaagtcatgtaactgggtatcgaacccgggcatctgactggagaccattctcttacccagcactgaggaatgagatatattaatttagcccaacacctagcacagagtaagtgctacataaatggccattgttgctgttgacattacagagcttcaataggctgccacgtctttctgtttttctccagggaccaaagcggatgttggatgctcaagtgcaaacagacccagtatccatcggaccagttggcaaatccaagtaaacaaatcagcacggttcccaccaggttctcctgccaccaagatgtgttctccttactccatctcctccccaaacacgctccatgtatatattcttctgatggccagcaaatgaaattctgcctagaaattaagcccgagctgttgtatattgaggtgtattatttacgtctctggtccagtcttttctggcaaataacagtaaagatggtttagcaggtcacctagttgggtcagaagagtcgatgatcaccaagcaggaaagggagggaatagaggaatgtgttcgggttaagtgatgaaaatggcagtggtggccgggcgtggtggctctcgcctgtaatctcagcactttgggaggccgaggcaggtggatcacctgaggtcaggagttcaagactagcctggccaacatcatgaaaccccgtctctactaaaaatacaaaaattagccaggcatggtggcacacacctgtagtcccagctactcgggagcccaacgcacgagaaccgcttgtacccaggaggtggaggttgcagtgagccgaagttgcaccattgcactccaccctgggcgacagagcaagattctatcaaaaaaaaaaaaaggcagtggcaagtaagttatagaagagaaatgctgctagaaggaattaagcgttgtagtaaatgcgtgcttatcctctaagcttgaagaagggagacgaaaatccatttgtttaaattcacatctcaaggagggagaacccgggctgtgttgggtggttgccaatttcctagaacggaatgtgtggggtatagaaaaaggaatgaataagcgttgtttttcaaatagggtccttgtaagttattgatgagagggaaaagattgactggggagggcttaaaatgatttgggaaaacaattgcttttgaggctcagtgacaacggcaaagattacaacttaaaaaaaaaaaataaataaaaaataaaggaagttgcacggttattttgcaacacaagggggcggcaaggtccccatttttatcctgtaatactgtatccctaacaaagatttggtctctgctatcttacattattaatgtttctcagatggctgaggggctcgcttcatctgttccgtctgacacttatctcaagtgtgtctgtcattcctaatgttctcaggatgtgctctgataaaaccctccccataacctcagttaataaaaatttacagaagacttctcaaatacctgagttgtttttaatacctgtacaaaggagtaaataggaccctgagtctattaaaatgtaattcaaagtagcatatgattgactgacagtcatgtaaactgtatctttctttttctgatttaataaaaaatacatttacttctaaag

SEQ ID NO: 11 - DNA, 73209 bp, Homo sapiens
  DNA (1)..(73209): CEP152
gcccaccgggcgagcttctagtcggcgattgaaggatgcgagtgctccttaagggcctccgccccgtgagttcggttgtgactaggaaggagctagtggactagagccagggtaaggggatctgctagaagttggtcttccgccaggactagagtttcctcgcggtaacagcctccgtggcctccggtaagttctgattcacgggtgagcttggacctggggttagaggagttgcggggtcctcgggatgctggctgagggttcctgggggggctgacctgccccctccccaaatcccgcggtggtggactgcccgcatgttgcgggctcagcttttaccttaacgtgtcatttagacctcttcattcctccaatatcctacttagaagtgacatatgggaagcccgcctcgtttccaggctgctggggtcgccctgagaccctactctgcggaccccgccttggtcaccctggcgtcacgcctggctcacagtaggtgctctgtgcacgtgtgttgaccgagtacaagtgacgctggcacccgaagccagtagccccgggcatcctgggccccgtgcggctttggtcatgtttgtagtgccgtagctgacgccaaacagttcctcaaggtcattcgctcagcctgtggatgcttattgtgtattagcattactcgctccgccctctgggcaacttgaatcaatttgtccaaagtgctgttattagcactgatcacaagatgttgtgatcatttgtttatatgtctattttctttcccttcatcgtgtcctgttaaactttgtaatcttgaacagtgcttggtaaattgtcgaatgaatgaataaggtgtctccaccaggtgttgcaagtctaaaccgggctatgtgctctggctatttccattctagaaggcgagttatgtcagcaagtaagtagaatttcccaactccaagtgcagttcttagaaaccccttttgtgggggtttataacccttcctatatcgtagtcatgaacttgagtctgatttaagcctattatcaccttataccttcatagtgcgtgacaatgaacatgcactccctagacaggtgaatgcactcaactaaagagaagctgaagttgaagccataagaaaagcataagaaatacagtctgaaagtgcaaaggagtggccagctccatgggggaacaggcttgggagggcatcttgaaggagggtggcatttttgttccataggaggttgcattattagaagtgacatttctcataggctgcacattcaccttttctcagatatgcggaatcctctttattccctaaacctcttcggtagctggcagactcctattcatcagtaataatgtcataatagtaataaaactacaatgtattgattggtacatagtgctaattactttacatgtagtatcttgtgaatcctcagaatcaatctttgaagtaggtattatttttacccccatttctttaacgtagaagcagaaacagtttgctcaagattgcactgctgataaatagaagagccagaattgagcccaggttgtctgaatgagtgccctcattcttagaaccacttatagccatattgtgtcctttaagatttatttctaatctaaaagctcttttttttctgtaaaacttctctaaactatcctttcttcttaggaaaagtaatttgtgctttgtactttcatctactacggaatttattacaatatgttattgtaactgtttatatcagtggctctatctaagagagggtgagcagagacagtgagctcctcatggctggtaccatgtcttaggtgcatctaggatatgatctggaacacagtgggtattcaataaaattttattgaagtaatgaattcgtataaggtaacatgcctatatcatattcagtcaacaaatatttgttatgtacccaccatgtgcaagcaggcagatacattttaattctgccttcagggtgcttatagtttattagatgaagcaaaaacaatgctacttttgctttgtaatcttttgtccaaatacccattgcttttgttgcaaggagggcagagaaaacaaccggggacaacaaaaggaatgctgggtcagagcatccatctgagtgtaacaacaagacatactttttatagtcttgttaagggttcagaaaaagttatctaggaagaaagtctaccagactgctattgaagaagaaaaccaaaacatactgtatacttaatctgcatcttgatttctcaagtggtcagccttgagtcaatagatatagaaaattttcagtatttttactagtggcatagtattgacaaattaattcaaaataattttactagtgtaaatgttaattttcaatatattaatattgatagttttcaagatggtttagcagttgatattttcaccagcaactcatgagccatacaaaatacaaaatagtcaccactgggtgataacaagttttttttttgtttgtttgttttttcaatctagtggttgaaaatggcatattgtttaaatgacacttctttgaaacatcacgagcttaagcatcttttcaaactaattgatttacactttttaaaataaattgtcatgtcagtcgcccaattttatattggattgtctttttctcatttctttgtaataattttatattgggactttgtcaggtgctttgcaaattttttttattcttatttttcttgactttgttattgatgtattttttcatatataatatttgactcgttaatgatgtcttttgccttaaacaaaattttattttttgtggttaggtttccatcacatttttctttatggcttttggatttactatcttgctattttttttttttaaagaagtctcttttgttgttctgaatattatactaaagtctctggtagcagtgataatgagtggtgattaataagttaaggtattagcttttattttaagtctcatttaaaatatgtattacctttttactatatatatttttaaccacattaagttgatcaggtttccctttatgtctgaaatcatttcttaaagtcttttatagtttatagttctgataaggaaaacttataccttcttcagtgggggagattttggtcttttcaggtatttttagatgtcttctttaatgacatgttttgaatttaaaataacattaaagatatatactttgatattttacattctctttaaaaacaaaaccctaagtattctctatctgagaaaaagtagctgtctatttaaaatattagtagctacatttttagcaataggctcttataaatcttaatgttctttttcaataatcaacatcagttgatggcaggttaataaaggatgggaacaaacctctcttctctaacttaatgaaggagaaagtaacccaaattccatatttcgtcttgtatttatatttgaatgaaagaaaggtagaagacacagaattcagaaacagaaaggattttttctgcctggaggattcaggaatttctttaaggtccagcttaatttcatctcttttttttttttttttttgagacggagtctcgctctgtcgcccaggccggactgcggactgcagtggcgcaatctcggctcactgcaagctccgcttcccgggttcacgcccttctccttcctcagcctcccgagtagctgggactacaggcatctcttttaaggacataggatttaattgggctagtattttcaatatatatagtgttctgtagaatattaagtctatttgcatagtggaaaaaaatctagagacatgagattgtgtgtttttccctcaccatttcatgttacaggctttttatcatattcatatcttcatcttatgttgacatacaaaaggattcttatagatagatttattttcctcgatatgcatgtctcttcccccgtttagccctgtcacaagggtagaaaggaataggtgtggtctgagaagcagaggctggagggttttaagttgaggtatagtctgagttgatatgagtttaaagggacgggttgggtgtagggaccagagaggaagggattagaaggtagactgcaaattagaggttggccaagaaacataactcagtctttgaaaaacaaaaacttgtcatagggggatttttaccactgaagttcatatgtatgttaatctttaataccatattcatctattctagcttgcatattttcttttcacactttaatatctacaacatagactgcgtcctaaaattaatgttatgtcataatttgattggctacatctcgttcctactgctacaaatggaactgcatcatagaatcaaagacatcttagatctgatgaaatgggatattgtctgctctagagctattggcttccacaaaagtttgtgatatagttcgtatctgttaagacgagggagctaagttctctatggtaaaatgcatttggattgctgggtctccatgcttctgattttacttccaatttaatgacattttagagcttgaaaggtgtagtgaatgagttgtggctcaggctcacatccaagtgcgtttcattggcatgaacaacagtggactgaatggagggcagtgttaggccaggtaattgatgacacctgcctacttttttgttgtgattgttcagagctttgaagttctgaggagtttatgtatagtgtcaggatccctaagtacaagttaaatcagcagcagcttttttgaatgtaagtagttgaaaacccatttcctgctgctgcttctgccgcagcagtcactgctccccagggaactcttgctgttgcttttggaattggaagtccacagtggtggagcttcacagccttcacttctgtttttcccgagtatattgccagaacctgattttatcaagcttaagaggaggacatttaagacttatattttgttgtgcactctatggcattgactgaattgtaaatggtttctgggtagtagtcattcactcatgatttaggggccttcttcttgtaaagcatgatatttggatttctgatattaaaaaaaaatgaagcaatagggtactgcctgtgccatgtttaatatatcacatttgaagttttgtttgagcttaagatttttacatttggcacatttctagtttattattattgtcatcttatttttcatgtcggcaaaaatcttactgttttatactcttcagaccactagaaaggtctattcatagctttattacctatttgcatgttttcttttccatgaattgctgtcatatagctattttcggtgaatcaccattatttttattggccataactgagttatacatattttctcccagtctgtttctgtcttttcactttgtgtatgtatggcatctcttatgtagtttgtcctggggagattttatgtggtgtccagaaaccaaacatctttcccttcccacaggaggaccatgtcattagactttggcagtgtggcactaccagtgcaaaatgaagatgaagagtatgacgaagaggactatgaaagagagaaagaggtaagttgttaaaaaaaaaaaaaaaaagagacactaaacccaatctttaacaagttttatttcttgatcaaaattgtatcatcttgtgtcattttgaagggatttggattttttaaaaaaaaaacaaccctaaaatctgcttgctatttagactgaaaaggtgaataagtggaatgcttctgtttttgagacaggaataaaacacaactgtgaataataccatcagataaatggttaaatttttcttttcatttaggaggtaatggttggctttggaagtggaaggttagtttctaggtgcttgaaacattgccatgaacaagtctgacaaggctctttgctttgggtagtttacatcctagtggaggcagacaataaacaagtaaacaagtgagtaaagtaatttgagtgagtgataatttatcattgataaatgacagggaaacaaattggagtgctatgaaagcaattgataggggattgctgtagatggggtggtgagggagggtctgtgggaggaggcaatatatgagctgagacttgactcatgagaaggaaccagccatgcagaagcctgaggaagagcagtctacgccaaaacaccaatgagtgtaagctgggaagttgggaagagaccccgtgtatgccacagatcatgtggagcggccagaaggccatggtattgggtatatatgagccagtgttgggtggtggatgtgggtgtcagatcatggaaagccatgataaggtgtttgtattttattctaagaacaatgggaagccagtggaggattttaagcagggaaaattgatatcatatttttgaagatctttcagaaggctgcatggtgaatagattatagaaggaaaggaataaaagggagagaccatattatttatatgtaaagtgtttagcagaattcttggcacatagcaaatgttcagtaaatggtggcaatagtaatagcagcagtaatagtgttattggtggaagtcaatttagttgttttggttgtttttagtgtaagtcaaatttcttgattgtctgtgataaaaggcttcttttgtcctgacgctattttttatatgacccattttctaacatgtaaaaaagtcttttttaatagttattgtggaccatgagtattaacaggaagcaaggaatagggtcagttgaccattgctcatgtggctggtggtagaattaaggcagtgatagaaaactggcaacttgctggatttggttcagacaggtattgttggttgcagagtgcttttaaaaaattgaatctgtatttgaagatgggaaaattttatgcagcactgcagagtctctggcttatctaaaaaacatccaaagccctggccacacctggcctgtatttgcacatggcagcaggcgggctggaactgagcagtggctctccttccccagctggccacagtccccacttctcacacagacatgggcttatgcactcagacctgcctgcttcactctggtaaattctctgccagggccctgagggcatttgagtttatgaccctggtgagggtttccggattttggcagggcccctcacaacaattgtggcaaggatgggaatgaggattttctgttactttgaacctgcagcatgaggtattcatgactgggcttggatagttggctggggtttagccactgggattcttgagaaggtcagtttaaataatcactactgtaaagaagaaaaaatattttgacaggtgatttttcattgagaaatatattagagagataggtctgccagtgtattgtgtggttaaaattttagaggggatactagttaaggaggcaattaattctagataatatagaaaacagctatttgggatcacctctttgatagattgtatgctgggatagggaatttcaggggaaaagttgttcttgaaagatcaagtatctaagaatgagtatttctagcagagtggaaggatatatagctgaattgactctaacatgatgattatggttaaatttgtaaaaaacttcatgttaataaaaatatttttactttaaaaaataattgctgcaagggaaaaagtgagatgagaggctagagaggttcaaattttagtaacaaacttcggaactgttcacaaatcttcagctgtatgtatactttgtcactacaagttaaagtaataaattgggtggtcaaacccaagcttgaatgcatatctagaaggttttttttaactgtctcagtcttcctgacccagcaatagccaaatggttcacagccttaagagattaaagaaaaaaagctgttttatcctgtctacctggttggtagctttgggactgtggctttgggattgtggctaggttataactgttagcagtgggctaatgcatattgctttctctacttagtgaatcactttgtgttcaagttgctgatgtgggaggaatgcctttatccctgatgatgtgctataaggcttaccaggcataccacatctgactcatagtctaccctgctaagggtttgtgagagcctgtcttggtacatggttggatagtcctgattttcactgcctgggatgaaaggctagttgctaatacagcatgtttttccaagctgtgtttaattttgttgttttggtgccagttgggattttgtccacatgggcccatatcccaatgaatacaccattccaaccttcatgccatcctaatgagcagctttacaattatgattttgctttttccatttctattctctccattgtttgtattgaaggtcaaagggagaaagtgcctttaacattcagaaaaaggaaaggatttagtaaatactttattcaatatttagaggatatttagaccagtggatctcaagccagagaccatcacaaatatacccatattttgggaaaaaaaaaagcaagaattttttagaaacgtcctataatgtatttctaaagtgctacaactcttaatggtacattagtaaaagttggcccactgtgagtcaaggcataaaggcatagtagagaggtacataaaccacagcttctcacagtgtttcaactgaaactctcatctcttaaaaatagtcgacagagcagattagggtgtagatcagtgagagtgatgacatcatagagatatgtatcgtcagttaatatcaattaattgtcacacattacttatgtttctcctaactaactggagggcattattttctgattgtaccacttgagagctgctggtaatacttgtccttcttgctaagaaggagatatcatccaaagcaaacttttctttataaagctgtcccagaaaataattcagaagctcttgtattaactcactcataatgtaacaatatgactttgcaaaaatgcttttcacctaagtctctatacttgtgattgcacagttggatattacagagatatagttctttttttttttttttgagatggagtctcgctctgttgcccatgctggagtgcaatcacgggatcttggctgacgctgcctcccgggttcaagcgattctcctgcctcagcctcccaagtagctgggattagaggcatgcaccaccatgcctggctaattttttttgtatttttagtagagacagggttttgccatgttggccaggctggtcttgaactcctgacttcaggtgatccaactgcctcggcctcccaaagtgctgtgattacaggtgtgagccactgcacccagccccagataaaggtctttttgtaataggcatgcttgttataagcctctcagttgttggtaaagccacagcttaaacaagattgccattttggactctcacagtcagctggagtagacatgtactttctgcagtgtcaccagaagtagctctgtgattgttgttggttccagatagtaaaattatctatttatgtgtgtatatattctggagctggtgatttggggcagaaatacttggtaatctatgatatcaagataatatttgctgatgatggatcatttagtgttgacgggtcatttagtgatgacatatttgaaaatgatcttgagtagaaaggtagatggtttaggtagcaggtggcagatagaaacttgcacttggcaatactgacttggtttttatagtggtacttctctaatagaataataaagctccattgagctcagcatcatgtattttagaggcaaggtttccattgcatagcctttcttccactttttaactgccttgtttgatgtaattgcggaagcattttgatattttgtttccactagagggagttgtaaagctagtatttgtttacatttagcgtgtatccatgaaagcattatttaataattcatatttgaaaatatcagaatctttttagaagcgtactaagaggtcacctgttcaaagggaatatgaccgttaggtattccatttgctaccctttctcttgggagaagattattgtatggtttgtaacttgaggcctcttgccttcatgaatattgaggattataggctctgaagataatctgtttagttaatttaagttgaaaatcctaacaaaaggtttacatgttctctgttttacatttgcccctgaatgtaggcttttgtatgttctacatgggttattgcaaagtgttttgttaacaaagttctttgagtaaaatgctctctttttttttctttttaagaaagaaacatgaagtagaaaaggaggggagtttatagaatgattctgaatttatttcaactgaagccttagagtggcaaattatctttcttacagggaaggtatctgttaaatttttaaactcggttaatacacagtaatatcctgttgagattgctgcttgctgccaaaaagcagtctgatgaattttaaattaatgagtggtattaaatcttatcacttataaggattgttatttctgttcttgaatctgtatttggaagtttgatagatctttaatgaggaaaatttatagtttctaaatttctgtatttggtaacatgcatatctagatacggcaattttgtgttttattgcacaaggttagtgaccaaagggcaatttgacaatgtatatgaggagggcacactttgatcctgggaaatggaaacactggaggtggaattttgttcctgaatggccttatttaggaggacttcatttagcttttctctgccctgaaacttacagaagccagggaatatgacccagctatgccaaagaacttgatggataaattttttgaagatcaattttaaaatgttagcatatatgtaaaatatcttgcaagactctgaatactatagggatgattttgctagttgatgtttatgtatgtatccagaagcattttgattagctgattgcttatactcaaattaatttttctctgtggatgccaattttgtggtgtcacaaagctacaataactgctgaattattatgtagttttttgtttttgtgcggggaaaacaatgtactcttcagatgtccctgtcaaggcgcccctgaattttaaggctatgtacttgaaccttactgaaggtttacaagaaaatattctttctgttcaggagtctttacttaatgtaagtataaaagatttgttttatttttccttgtgtaacatgtgggggtagtctttttccttaaagcagtgatgcataattctagacaacaagtggtgctacttttaaaagacctcatagatgcaacttttttctctagtgcatttgtgtctttgtagaattgctttgctacctttcatttgaggcatgtcttgtacaaatatgttgatgtgttctgttttgtttttcatgttgtgtcttttgtatttcttgttttttatatctctcagtcaactctgatatggctaattctcaaaatgatttttcaagtaccttgcatgtggagatgagcatttaatgagggtcttgtgtgttaatgttagcgttaaaagatttaaagatgaagataacttttcattgaagaaaatatctttctcttgttgcatctttagatgacaaatggattgagaaaccctttaaaaaaaacccatccagtgaatatgagaaataaatatagagtgaggaagtattcccacccacctccaacatactctgttcccattcccaaattttatttcaccaaagctcagttaagaatttggggcattcctttcagaccttccataaaatatatttatttaacttttactatacatattttgtttaagaaacttttttttttggtaattcttaatataatactcagatatgttttatggacacattccatttcttttgtactaatgacaggtaaagtggaaaaaaaatgctatagaccagggagcatctcattttttttttcctgaaaggttttacaaagtatttaaagtctttaaaatccacttgcacaatgttatggggtttgatttatgtcctttggagggatttaatcaagctgtcaattaaactggtgcttagtttcttaaagagaagtaattagaaacagtttccctaaaaagtatttagtaacataatatttgatcttctaattgttacataatttaagaaatacattatattgggatttttagggtaatattattatattgggttttgaagaaagacaatagcagacagttattgaaatcctaaatgttattgaattatgtctaacagactagcttatttactcatctttttatcacatttgaaatttgaatgaattaattttgtctatctagtttatataataagcagaatgctaaaactgatttttttctagaaaataataggagagagaaatcaaacatttaatgtcagatgtagtgtcatgcttttgcatgtgctatctatagaaaacagtcttccaactcttcttttactcagatgttgtatgagagcagggtattatgtatcttttcatctttggaattagatggctctctactaattagtgactcccacgggtttctacattatcagagcatttaagagcttctaggccacctgctgctgctgctgttctcatcacctggccagagtgcatctggctactcacattccctgtgggatgcctaattgtcaattccccaaggtctgattactgataaaacaggattctgagacttagtctgcctgccctgtgataacataatgcattgattgtaccattattgtgacttgctgtgtttccataaaaaagtttttgaattctgctctatgtgtatttaaatctgagatcttcgttaaaaaaaaaaaaagccttctgatataaatcctaaaattatgcattcccttttccccaagtgaaatgatgaatataatttgtgtggaacttaagaagttaattaaaggagggaattatgaacttctttgacctctacagtaaaaaaccactcgttccaaggcagctttggcttggtgtcttgtgtttaagttggtatgatattgatgcagaccttttgactcagttgcagcagttactcacagaccttccccatgacatgctggatgacgacctctcctctccagagctccagtattcggactgcagcgaggatggcacagacggacagtaagcacctgaagtcactttcacttgtatattgcaattctataagtctttttcttttgatgaagattaataattacatgattataaaattgtaaattgattcttaaaattttgggtgaagattggaaggaaaaaggttaaaatcttggggttctttgtgttatctatgtacaaataaatgatacgctttaaatcgaaagtattcctttttctcgagaccacatcatcctgagcaattggagatgagctggaatgagcaaatgctgcccaaatctcaaagtgtaaatgtaagtatctggtgtgatgatgactttggtgagggtgggactggatcttcgtgcttttgttttactcttgttatctaatagggctataatgaaattcagagtttatatgctggagaaaaatgtggtaatgtctgggaagaaaatagaagtaaaactgaagaccgacatcctgtgtaccatcctgaagaaggtggagatgaaggtggaagtggttatagtcctccaagtaaatgtgaacagactgatttatatcaccttcctgaaaactttaggccatataccaatggtcagaagcaggaatttaataaccaagcaaccaatgtaattaaattttcagatcctcaatggaaccattttcaggtattgtaaaaacttgactttcaagaacttgtgtgtgtgcacacgcatttgcgtgatgtttgtgtgtgttcaggaaatgtatgtgagtacaatggtaagatgatttaaccacacgaagttctgagagggcacttattcaggttcatggtgaattagtcatggtattttctgtttacagtctaatacaatcatgatcttaagtcagaagtttaaaatagaggctctttggacatagttgattaaacattaaaagttaagtctgccaaagaataactatcctcatttactgctgcttctaccactgcactgtgcttcaatgagaagctgtgttcaggtctcttattgtagtttttaaagcagtaattctgtgtaggtggcaacatttaatttcctcagttttcttgctcaccacccataacaaattttaggttaaacatgtcaaagctgatatctctattgtatggtgatataacagtagacaggatgaatgtgaaggaaaaaccaaaaaaccttgtttttcctgggggggagtttaatgaagtaagacctcaggatatagttagttgcttcttagaatttctcaatgacagcaaatacctcaacagctagtctgtgtcacgcaatgacaggatggattttttaggctgttaagtggttattttctcttaattctatctccgtagaatgttattattcatcccataagagttactatttattagatatgaggcaccgtggtccatgttcatgttattggatatgtgcatttttatattcccaagatgttggcataatctaaatcatttgtaataaaatatttctatatagtcttattggaattcttgggttttatttataaaattgccttcattgtgtgctcaaaagtagaatttaggtgtctataaattatgtattgcagactttcaattaatagtgttaaataacaatacgtgctacttttgagcagatatatatatgtgtgtgtgtgtgtgtgtgtgtgtgtgtgtgtgtatatatataaacaactttgaactgtaccaaaagtaagttctgtaacgtaacattaatttaggtgtctaattcagataattttggaagaaaaggccaaatcttaattgtcagtttcatttgttatcacagggtcccagttgtcaaggtttggaaccgtataataaagtgacatataaaccttatcagtcttctgcccagaataatggctcaccagcccaggagataacaggaagtgacacattcgaaggcctgcaacaacaatttttaggagctaatgagagtaggtatcaagtttatatttattttttaataccacataattggggaaatttgaatacacaatgaatatttgagcacattcaagaattattattttttaagtatgacaatagaattgtgcttgatatttcaaagagcccttatttttagagatatatactagagtatttatgaataaactgacatgaagtctaggatttactttaaaataataggctgttgaggggtaatgttgggtgggaatatagatgtggccaaattggccatgagttcataattgttgaatctgggagatgggttcgtggagattcatcatattattctctttactttcttatatatttgaaatttttcgtaatgaaaagttaaaagacatttttccaactttatatttcagtcattctagtttgttaagccttttctccttatttgtatagtgttaagtatcctcgcctatcatacaggatacctggacttatttgaaatttaaaaaaattttaaaagactttttatgaactttatatatttttttgactgaagcctaatttggaaaatgaaacatagttttcaatctcagatttttgactatatagaagtgtaatttaatacatcagcactatcatcaacttttttcttttgattttacagtttttagtcaactctgatataaattagtttatattcagaattacttagatatcaggttcagtcatgtggcatttgccagttttttttgtatagtatgtatataaatatgagaatgaaaaaagtgcttataggtactagagaattctgagatgaaatgctagtatcaaaaaacaaaaatcccaaaatataaacccgtatagtgactgtactgaattactcttgtcatactgtctggcacactaaatagcttctaattattgtgcatattgaagagccagtgtaattctagagtgtggcagcaagtgtttttgttttactttttgtttccctttaattagtaggggaaaggtcatactggatattctggcttacctgggctataccaaagagaaaactggacttttgggttgtgacttcatattgttgcttccatcgtacactgggacggcagggtagttacagggggaggcccagaattcattttcccctgaaggagtcaacagcaaatatgaggatggcctctctttgttcttaagttttttgtggaatgaggaagtggacagtgtatatgacataactggttttaggttgagtaaatgaacctcacagcagtggcctgacatctccttagtgtttactctttcagttcccttgaaaagttgtatttgtatctcctggtctttctgcatataaaaacctttccttacctttcttaacactctgcacttcttcaagttgagtcagttacacatttgtctaaatttgacatttggaagttaattaaataacttaatggtagtgccaaattagtgattatagtttcttagcaacagtaatttaaaaaatttggagatggggctagctctactataagacctatgaggagtttgacttgtataaacttttcagtctttaattttctttatttaaccagatctctttctaaaaagaggacagaattatttagttagcaagtggttaaaactcagtaaatgcatttatttctgattgtaagctaacagaaacattgttctagtagtaagtagaatatttatcattatgtagttgaagcatacctaccaatccttttttccattttttttctctttttaaagtggtccccaaatgactaattgtttctaaaagaagacttcaaaaatttttttttaaattatgtattcgtggagtagatttggaggtttgttatatgggtatattaaataatgctggggtttgacttctagtgaacccatcacccaaatagtgaacatagtacccaatggatagtttttcaacccttctcccctgctccctccccaaaattcttgattaatctattcactagctaattaattcagttatgtgccagcatcaatataaatataatattttccccactcctgcctaaaataaaatattttgaggctgtctagaaattttctttaaaaatgattttatagaagctgatgtacttgttttgtttttaattttctgacagcatattactttatttcattgcagttgttatatactgatttttaactggctaaaatggtagttagtgattcagggttataacttaaaccagtgactttcaaactttcctatcagtgacccactgtaagaactatatttttttacattgtgatatggtgtacaacatgtatctatatgaacaggtatatataaatgaaacaagtttcacaaaataagactgtttcttactacatgatgcactctgatatattctctctctcttttttaatcctagtcacaattcactgaattgatttcatgatgctctaaaaggttgtagtcacagtttgaaaaacactgctttaaatgactataaatttatattttggtatgtttttatctaataaattgtctttaattcccagactctgcagaaaatatgcagattattcaacttcaggttcttaacaaagcaaaagagagacaactggagaacttaattgaaaagttaaatgaaagtgaacgtcaaattcgatatctgaatcaccagcttgtaataataaaaggtaagatgctggatgctgtcatttatgaggtacactgagttagatatcttgtttccaataacctcagattacatacgaagcttagagagtaaaaacacttggtcagagggctcatagtgagtgaggcatagcaaaacaaaacccaggatttctgagtgttggccttggattacttctctttggaacacgctgttttggagaccaggcatggtggcttacgcctgtaatcccagcactttgggaggctgaggtgggcggatcacttgagatcaggagttcaaaaccagcctggccaacatggtgaaaccctgtctctactaaaaatacaaaaattagcggggcatagtggcaggcacctgtaatcccatctacttgggaggctgaagcaggagaaggagaatcacctgaacctgcaggcggaggttgcagtgagccgagaaagcgccattgcacttcaggctgggtgacagagtgagactctgtctcaaaaaaaaaaaaaagacactctattttggagtccctatattttcccttttctcacttaggcttttagaatcattgaacattatttaactgtactgatggcattctgtcctaaaaagttgttgattccttatgtctgattccttatgtcattactctggatgaagtattccagctttcagagtgatttgtgtttagtttgcactgcagcgtttcctgaggctacaaattagcataaacgttttaatccaaataagagttagtgattgtgaagtgccatgtctgggataaacacacagagtaaatacagattcaaattataattgcttactccttgtgctttctctagttttggtccacgttgaactttcatttgcagaatacttttgtgattgaactctagctcatttcaaatttaattgatggtaaaaatgtctctttctgtaatgctcataacatttattttgagagaagaacttgtgagctgttatagcaaagtatgtgggaagaatttaacattaggtgaatttaagagttcattccaagtgggtcgggcacggtggctcactcctgtaatcccggcactttgggaggtcaaggagggcgggtcacgcggtcaggagatcgagatcatcctggctaacatggtgaaaccccatctctactaaaaatacaaaaaattagctgggtgtgtggtggcgccagtagtcccagctactcaggaggctgaggcaggagaatggcgtgaacctgggaggcggagcttgcagtgagccgagattgcacctctgccctccagcttggcgacagagcgaaactccgtttcaaaaaaaagagttcattgcaagtatgtgtaggataattagtcctcagataacttctttgattagcagggatttgtccccaaaagggatgcaataatagttttaaaggaagtagttctgcttctctaaaaaaatttttttggtatcaggtttgtttttttttttaatttttaatttttaataatttatttatttggggctgggtgaggtggctcacgcctgtaatcccagcactttgggaggccaaggtgggtggatcacttgaggttaggagttcgagactagcctggccaatatagtgaaaccccatctctactaaaaatataaaaattatctgggagtggtggcaggtgcctgtaatcccagctactggggaggctgaggttgtagtgagccaagattataccactgtactccagcctgggcgacggagtgagacgctgtctcaaaataaataaataagtaagtaagtaaattctttatttagttttctctaaatcaactaaagttcatttttctgaattaaatttaattcaacaacatttatatatgatacagacgtgacatctgattgggattgtgacattggggtccctctacaggaacattatttatataaacatttttaataccgtagatgaaaaggatggtttgactctcagccttcgagaatcacagaaactctttcagaatggaaaagaaagagagatacagcttgaagctcaaataaaagcactggagactcagatacaagcattaaaagtcaatgaagaacaggtacctattttaacttatgtatggtaaaaaaattaaaagtttagttatttaacaaaactttttgtagggtaggactaaatttagaagaactttgaagttattgacaaagcattagaacttaaatttcctgactgcaatagtttgcttcagaattggtatcccgagaagcttttatttttatttttcctgctgcttctccatttggagaactgttttttaaacttgagtttaaagtggtgacacattcacattctttgattaatgagatagccatttgatttttggaaatagtcataagtcattggtagctaagcctggtggtggttgattcattttttggcagggggcagggttaaaaatgaaagtgatggccggatgcagtggctcacgcctgtaatcccagcactttgggaagccgaggcggtcgaatcacctgaggtcaggagtttgagaccagcctggccaacattgtgaaaccccgtctctattaaaaagtacaaaaattagctgggcgtggtggcagatgcctgtaatcccagctactctggaggctgagacagcagaatcgcttgaacccaggaggcggaggttgcagtgagctgagattgctccattgcactccagcctgggggacgagagcgagacttgtctgaagaaaaaaaaaatgaaagtgactatgaaataatgagcttggttttgagtgagacttgtagctaagtctgaggatggtttaatgaaagagtttaaacagtgttgtctcatgtctggcttctcctcatccttcaggtcttagctaaaaacaattaccttttcagaggacttgctattcactttatatgtaaggtagcccatagctccatcctccaactcaccttcatcatgccatattctattactctataactatctgaaatgatctcatttgtttacttgttatttattgtctcttcccactagaaagtagtaagagcttagaccttttctgtttggtcattatgtccttagtgcttagaaccctgcctggcacaaatgatctgtgtcattcagtggatggatctcttagccatgaaagcagtattggaataaataggcaatctctggaatagaatgaagaataattctcttgaaattttaatttttgtatgtaatgtagattatttttaactttttgaaaaccaatagttattagattaaaaagttaagttgcctttatgtagtaaaaggttataactttgtaatcttttttatgtaagcagcagaatcaccaagtgtattagtttcctattgctgctgtaacagatgaccacaaattcagtggtttaaaacaatacaaatttatctcacagttctggaggtcagaagtctgacatggatctcactaggctaaaatcagggtgtcaacaaggctgcattgctttccggaggctttaggggagaatccattttcttgctatttccaacttctagaggccacctgtgttccttagcttgtggcccatttccatcttcaaagccagcaatgaatggctgattgagtctctctggttctgacttttctgccttagtttttctcatttatggaccctgtggttacattgggcccacctggataatccaggctactcaccttattttaaggcaatctaattagccatattaattccacatacaatcttaattttcccttgccatgtaatataactgattcacaggttttggggattaggacacggtcattttggagggctatgattttgcctacaataccaactgtgcagttacagctttgaaaactttgtttttagtaagtgaccattggcaggtttcatcagtctttcaaggaacagttgtcatttttctgtgacctaacaattgggttaccccacactttggtcatagagcaatgcaaacagcactggggccatcacggcatcagcagattccgtgcctgatagccacatccatcatgctgcgcaaaatcctctttcactcccctcaggtatctaccaaatgtattttctcagggaacattgtttccaacaactatgggcctggagggtcccagctagggttgttttaaggagcttgagccatgatgagcggagaccccttctctactctcattaaaacatgcttgagttttattttatagtaaaagtaaaagtttatagacagcacagagctaaaatactctgtgtatattttaaacatggatatcctgtgtgtatttactagatgatcaagaagtccagaacaactgaaatggctctggaaagcttgaagcagcagctggtggaccttcatcattctgaatcacttcaacgagctagagaacagcatgagagcattgttatgggcctcacaaagaagtacgaagagcaagtattgtccttacaaaagaatttggatgccacagtcaccgcacttaaagaacaggttgggatgatttcaaatgagcaactgttatcaacaagtaaagctggttatgttttgtaactgatattttatggttcatcatatagaagtcttggatgtttgtagtaaatgttagattgtgtgtgaggtgagtgaaacttaaaagccagtgatattggctggacgcaatggctcacgcctgtaatcccagtactttgggaggccaaggcaggcggatcacctgaggtcaggagttcaagatcagcctggccaacttggtgaaaccccgtctctactataaatacaaaaaaaaaaaaaaaattagccgggcgcagtggtgcgtgcctgtaatcccagctactcgggaggctgaggcaggagaattgcttgaacccgggaggcagaggttgccgtgagctgagatcgcaccactgcactccaccctgggcgacagagcgagactccgtctccccaaaaaaaaaaaaaaaaaaaaaagaagccagtgatattttaatctgagaatacatcctaaaggtatacttttggaaaccctacttcttatacgattattagtactttctcaactttcacattacttgtcctttatttgtagggtatttgtgtatgttgtttatatggtcctagaataaatccagaccaaaacaaatgagtctgccagcggctggctagaacttgagaggttaccttggaagcttaaccagtagaaaaccttacttgagtctcccagcatttggtaattcacctgtcaatacagcaatacagtctgttgagaaatgattcttgggaagagagtaaattttgaggacagtataatttataaaataagacagtctgatctagacttaatgagatttgcatcttgagcatattgcacagtgaatttttattattttcactcaagggggaataaaatattgaaagctaaatgtgagtcaggtggtgagtttgcttgtgctccataactctaggtaatcacttgagtgaataacatttcagaatttatttttcttaatgtaatttcaaaattgatttaacttaagggaaggagagaagaaaaatcagatgtgagggtatggaaaatttcaccacacttaaaattcatgctgatttgggttatttctgacctatatagctgcctctaatttttccatgcttttaggtagaactatataagagtgcattactggcaataattatttatcattttattttatttttacatgtatttatgtgtgtttttattatatctatttcattatgtatttattttatataaaaaaattgtgaatttgatcaatgtggaggatatataggagtagggaaagatgaaggccagttacggtggctcatgcctgtaatcccagcacttcgggaggttgaggcaggtggatcacttgagcccatgagttcaagactagcctgggcaaaatagtgaatccttgtctttacgaagaaaaaataacaaattagctgggcatggtggcatgcgcctgtagtcccagctacttgggaggctgaggtgggaggattgcttgagctcaggaggtcgaggctgcagtgagccatgattgcaccactgcattccagcctgggtaacagagtgagactctttttccagaaaaaaaaaaaaaaaaaaacgaaggctataccaaattattgaaaagtctactttatagaatatttaaacagaatttgagatgtagcttcataaatttttattttattttattttaaagttagttttggccaaacatagggtaacattgaagttagttggacttggacagtagcccttcttggatgactggagaagagtggatcctggtggcttttccttattgggttgggggtctccattctctgttgacttaaacacagtttcattagggatggattggaaggaatttctagtgttttctacccctgtgcccactgcattactctgttgtccactgccccacccccttcaatagaagaactctacagtaaagtcagaacaaattcttgattctgtgctgggtgggtttcagaccccggaatccataaattgaaggtgttaaggtcttttcccactgttacgttctttgcctatttttactttgttttattattattttttttaacagagcatggcactgatgttaggctctgcatataattgcatagctgctttgcaaagtggtgattccaaagcgcctaacagaagcccagacctcggcatcatgccacatatccatgtaacacacctatacacatatcccctgaatctaaaattaaaaacaaaatgtctgtaattagtatattttgagaaatttatggattgtaaaattattagtgtttttcttaagacagcagcttttctgggtagaaaagattgtatgcactcacaacatattataatagttctttttttttggctgattttcccttgaatttgtttagtgagacagaaaaggtgaaagaaatgggcttcttggagctcatagtgttcctccaatgtcataattctctcctagtaaactatcgcctggactctctccaccaaactgacttttacctcctcccattcatggaagtgtcatgttaagatctctgattatctccttgttggtatattacttttttccttctgtctccttgaaaacttcagcttttggtgaagtcatggactttggtttctatgtcataaccttttaccttttctttaatgttatatttaaaggctccactttgaacactttctgttggcttagagactcccacagacttctctgtgtgtggtccagtcctcattttcctgtgtgctagaaccctgtccagttctttttccctcccacagattcagctgtcatctctatcatctctctctctctctctctctttttttttttttttgagatggagtctcgccctgttgcccaggctggagttcagccgtcatctctttatcattacacttgtctcagtcttgaaaaatgtctgcccatatcagacttgaactactcaagctaatcatggcaaacattgagctactcaatcttttttgatttttggtattaaaactttaaactttaaagttttatgagtatgatctgttttcctgaacttgtcaataggatacaccatagtttaattgatttttacataaaatcaaattattggcagagtctgccttttctttacaatttttttatacctaccttttctttaactttgtttgctagttcccagtcccttgttaacactattgtgacctccccagaatataaatattagctgtctccccaccccttcttgctgtcattactgtcatgctgtcattaatatgagctcattcattgtttttgccacgttactttggcgctttagaaccaggtttctcaagctggcctggaattcgcagcagtgtgccaggaggtttgcagtgctgaataaacatggactagtttccagaagcttcattttgctcaaaaatttagtagaaaaaatttaaagcaaacacagcttcattatgaaatagaatacaaaattcacatggatttttaagctaaaatgggagacttcagagtctctttgcttcaaggtagttatgtattggtgctcttatgggatgtaccttgtgttagtatccttaaggtattattgggctttaggttatactacagatcaggcagcaaaagcctaaggccttttctctacttcaaagccctttctcagtattcttcttatttcttattttctttaggttttcttgggtaatttcagttaatcaacttaactcattcctctgcctctcccatgctctgccatttgcctggaattcagcctgtgtagccttttttgaaagaaaggtgatgatttcgacagtgtgtttgttctacctggactcaggactcccgtggtttattacacccaaacatattttcttttggaagaaacttgagtatattgcatacacactctatattttatgtaatcccatatagttacacacatgcacatacacatttaccctatttttctttgtcatttatttttcaagtgtttcttacagcacttgatatgtctaaggcactgcagaagcaccttcaagggggctattaagagaaataagacatctaaaaggtggagaaagataagaaagaaacagatcaagtttaaaagaatttcagaggagggaaagattattttttggctgctcttaatggaatgaacttttggctgcttagaatacagtgagttttcatgtgtttatctatatccttactgttttgggatacaaatagcatgattcaaagtagtctgcctaaatatatatacatacacttatactgacaatataaaatacgcataggaatgtaatacattttctttggcttgaataaaatctaatttttgaataactcattgtcttgtgaatatagagttgaaggagactttagaaggcacctaattcaacctttattagcataattacaaaagaagaaacagactgaagagttgaagcttcacccaagctcttgactcccagttctgtgcactttaccttgtaaaagaggtgatgctcccatgtgatgatcttgtgtttgacatcaaatctaattatgtatcataatttttagtttactctttattaaaactctttatgaaaatgacttcctgaactttttttctatttaggaagacatttgctctcgtctgaaagatcacgtgaaacaactggaaaggaatcaagaagcaatcaagttagaaaagactgagatcattaataagttgacaagaagtctagaggagagtcaaaagcagtgtgcccacttgttgcagtccggtaggtgtctggtaggtccactgtctccccagaaggttggttcaatatgcagaaagaatgtagtaggatccatgacttgtaaaaatccagaagggacagaaaacacaatcagcaataaatttctttaaaaaaaagaaatatatatttttatatatatacagaaggcatatatatatatatacatatatatatatatacatacacacatatataaaaaaatatataaaggtttagtttgtttttattaaataatttggaagctggagaccagtataaagtaccaaataaaaataaccgtaattctactactgagataattattgttagcatttgaatgtatttccttcaaatgaaatgaatgtacacacatagacaatgtcctgcttctttatgtaatgcatttctgaaaacatactaaagctgaacatgcaaaaattgaacaataaaatacattatagggtaatttctatccctgaaaactaaaagtgattataaaatcccattatattttgcttttttaggcccaatatttgatcatatagttctatcctttgtataacttctttcatatttttcccctcataatggaatagtgacttacctagtcagttgaggccagagagttacatttttgtcatgcttcagatttctaatatggtctttatagtattaagtttgagacatatgcttcctatcattttagtttcagcagttgttttatttcttattaatttttataaaatgatattagagcaaagaacaataaaatgatcacgtttgtacaaacaccgctatatagacaaaacttccctgtttgctggtaagtagctcacattgtgaaaacaggtcaacagttattcattaactgatatatgaaagtcacactttggcatatgaaaggtaatttagactgttggtacaatatgtgaaagggtgggctattcaaaagctgaaaatactaaagtcaaagactgcctaaatgtatgtgtatatatgtcttgatagggggcaaaatttggattatgctttattaagggcccctccctgtttagttttatagcctttgttttcatttggcattacttggtgagcctttttcctggctgttaaatgctttgaaaatattattttctttatgccatcattgcttcacttaatcatttcccagatggtcattttcttttgaaacctaataatgtcccttttaaattgggaacagtccccccaccaccttgcccagtacatttaaaatattaggtttctaaagtttcagaattataaccctaatacacttcatttacatgtggaggtggggatgctggatagaaaagcatctacaaagaagttaaaggcagcacggtatagttttcttattgcagggtagaaatgggttccaaagaattttttctttgacttaccatgagttggagtgttacgctcctattaaaggacttccggaatgttaaggtctgtaaatgtgactgatttgattcataaaaaggtcatagtagcccatgcctttaactgcccaaggtcatatgggatgccatactaaatctgggaaatgtctggcccagacctatgccttctgggtcccatgggctctatgtattctaaagagacagtagtagtaaagcagaactttactttctgtagcctcagtggattcaagtcttctgtagatcataagcactttgtccccttaattttttcagtatatcctatggttctttcctctgcagggtcagtacaagaggtggctcagctacagttccagctgcagcaagcacagaaggcacatgctatgagtgcaaacatgaacaaggctttgcaagtgagtgttgccacttggaagaggctctatgggtatctgaattaggcagtagttacatcacctttttgaatcttgggtttctctgtataatagaggtggttggaccaccttcaaaccagcccatgggagttgttcaccatctccttcacacagttggcaagtcaaactcaggtctgtctaattgcagagccaaggccctgcacttcctgccagcttgcctgccacctccttcaagtggcatgtcctttcatctttgggtgtatcccagagatcagttcatctatgggggtggggaatgttgaattttgctgcaattctgtcatatcctcctccagtgctatttacattttccactggagggggaggaaaatatgggagaagagttccattattacctccaccttttcaccaccggcaggctaaagtacaacctgttcttggcaaaccagcgtactttgtcctgtactctagtaagccagaaagcgccgccatcagcatttaagcccaaggaacacaccactttccatggaggacaaaatctaagagacagagatgtgagaggaaatccttatgtttgttttctcattcatttattcatttaggctttacttgaaaacctgatatatgccgacctttataaagtataatgtgtactaataatatatttgaagaagtttttttgcctcctgttgatcattaaaacaaattttgaaacagaatgactgattacttcatataggaaaatagtgaaaattatttttaataattttgtgttgtaggaagaattaacagaactaaaagatgaaatttctctctatgaatctgctgcaaaactaggaatacatccaagtgactcagaaggagaattaaatatagaactcactgaatcgtatgtggatttgggtattaaaaaggtcaactggaaaaaatccaaagttaccaggtatggaaagaatattttagtttactgtagaagaaccaacattagtaatgctgatgatgcatggtatctgttttaaggtgagagcgtattattttcatatgttaacactgtgtattgaatgcagataccttgcatttatcagtgatagtataaaaaatatacattaatttttcctagaaaccttactatgaccttacttttaaagtagagattctgtcttttatattactgcttaatacagatattttagcaatctcatagtaggaagtattttatcactcctgctagagactgactagggagggagtagtggtggttgtagaaggagaattaaacacttaaaggacttcagaagcacttgctgcgtggaaggtgctatacaaggctctgggaatagagtacaaaagatgagataggaactgtccttcccacagggagcttacgtgttttctggtcagggagaaagaaacattgttggaaacaactaagtgctatgcattcaatgttatgtttgatgtatagaggtgggatttacacatttcctgtactggttttggatagggaagagagagatacggtgtttggaaaagattgtatttaggttaagaaaagatttttggatgcgtttggcccttaccaccacccttttgtttatagtttaagatggagttcgtcatcattgttgaattgtagtttccagagagtgtttaatacatgttgtatttcaggtattacacaactaaatacaaatatataaatgtcctgaaaagtttgctctacgataggttttagaagttacatattttgagactgtgatctcattttaagaacagtaagatgagattcagtaagtagaaatataaagtgatcaggtgatactgtgaaagtagatggtattattctagtttagtaaggctccatttatctagaggtctgtcttcagggactctcatccctacaaatcacagcactgctatccagaaggaagcaaagaagaaaatatcagaactggattatatgatgtatttagtaggagccaccttcaagttcttatcccaggaccatattgacttagatttatttgtactccatgaattgtctcatttcctaaccaactgcagagggctagggcaagggttgggaaagacagtatccatccttcggccagcagctcagccttagcaaggagaaaactatggaaacccaacaggctagagttgctgagtatcacagcaaatagctctacacatttacgtgtgtttgatccacatcaaaatgtccacagttatgatcccaagttgtcaaagaaaggcttccagtttggttagtaaattaaagcaaaaaacgaagtgcattatatcttttttagacagatttacataaaatgttaatatagtcacctggaaaattcactgctgtgaatgcctcatttcctgctaatgccagattaattctaaggggctactgggaagagcgtgggctttagatccagattgttttgaataatagttttgccattttattaccagctttgtgagcttgggcaaatttcttagcttttctgagcctgttttcttatcaagcttaaaatcccttggaggttaaactgaggaataaaataatgaatataaaaggccttatgtaacacgttctaacatatattaggcatcatttgataaatgatggctgttactattgttatacagtagatggttgattaaaacatatcactgatcagattttatattaagtcacatgaattttgtattaattcaacacatactttgtaaatgttcttgattctcaaccttgtgaaaaatatcaaatccaatatcaacatgtgagagttggaaaaaccagagtgaactcctttgcttagtaaggcagacaattagtagcagaaccagtacttgaacccagactcctgagaaaggctcggttgtctgtctgttcatatttacatgtcagttaaacctttttgccttaaactcctttcttcatgtcttttatttttgaggattaaagatgtagttcatgacaaaaaagatttttctccaatttgtgattacttttagtttctgctctagttggtctgggaattggataaataatacattatgtatgtttatcttttcaaatagttacttcttcatgatgtctattaaaacatattctgctacctttacactttctatttacttagtgctcatagccaaaatcctgtattcatctttttttttttttttgagatggagttttgcttttgttgcccagaccggagtgcaatggcatgatctcggctcactgcaacctccacctcccaggtttaagcaattctcctgcctcagcctcctgagtagccgggaatacaggcatgtgccaccatgcccagctaattttgtatttttagtagagacggggtttctccatgttggtcaggctggtcttgaactcccgacttcaggtgatcctcccacctcggcctcccaaagtgctgggattacaggcttcagccaccgcgcccggcctcctgtactcatcttaaagcacattcctatagataataaacctgagacaccgcatcattattatagtaaaaggaatgatggacgcattcagtgggaaagtgaagaataaagcacagtgtgattagtcactgaggctcggcaaaaagacatccagtgaagcacaagataagcgaagaaacgttttgcttgtagtcatcccacccaccagcagtttattagatgatattttggcttcgtggaaaactaaaagctattatactcagatcaaattcaaaggagataaaggagagaagatatttgtctctttcccctggtctactgtgattcctagaataaggggaagcaataattttcatgtgttgggaattttagttctttgttgacttgggctgctttcaaatcactgactcaaatattggtggctacaagcttttattaccaactacctcctccctcaagctactgcctagtaaattttaagggtttagcctcaatgttctattttacattcatggaatttgagtagctaaatctgcatgcagcttgcagacagcttcctctctcccttattatagttggctgctaagctcaaataataaacatttaacaagtggaatgccttttccctttggtcttctcagcaggcttcataagggactacagtttatttggatttaggagaactgacttccatgggactcagtagtgagcctttttcaggattggtcactaccactgatttttttcccctttgaggaaagaagagaaaattattttagcaagcactttctctctctgacttggctccctctaggagtacaggatgtgctatttcagtggtcagcattcagtaagaaaagaaattggggatgcataatttgttaaccgagcaaaataatcattctgcttaaggttagttcaccatgtcttatggcacaggaagttatattgtaaaatattttatatttcttgtaatttatattttctacttcaatggaaatagaagtggtttaaatgagatctatgtatatagacagactacttacaaaatatatatatatattacatatacaaatttgcattttgtattgcaaaagctccttttataacattaaaaagcctacctaatagtttgttcattttctctgtctcgcacacccatacacacagacacacacacacacacacacacacacacacaatattctaagattttatttggaatcatctaaaactgaagaacagtaaacattttaactcaggtagtatttttgtttctaataaaggttttttaaaaatatatttttggaacagtttttaatttacagaaaaatttgtattacgcagagttcctatatacgatatgctgcacccatttttccctactaataccttatgttagtatggtacatttgttacaattaatgagccaatattggtatattattattaattaacatccagggtttatttacatgcccttggtttttatttaacatactttttctgttctgggatcccaaccaggctaccccattacatttaggggtcatgtttccttagatttctcttgactttacttgtttttgatgaccttgacagtcgtaaggaatactggccaagtattttgtaggaagcttgtctattggaatatgacgtttttcttatgattacgtttttctcatgggttttgtggagaaagaccacagagactttcatcacctcatcttaagggcagatactgtcaactgtttatttcttttcaaaagtaacttaatcctccattatgaaaaaattagaaaatacagactaaaaaagaagaaaatagaagtcaccaataatctcaccttacttcccatgaagaaaaccacttttatatttcagtataaaacttccacatcacctgttttgtatgtttctaaaagataaaataatattgataatatttctttataatgtcattttactagtatattctgaaatctttgaatattagtgaatatttttatagattacttttagtgactatgtagatgaatgaaccagtttagctactaaatcgctgtttaaaagttttacttataaataatgcaatatcattgttataagcatccttgtagtcaagtctttattcacatctttgattacttcctaaagaagtagaataattgtcttgctagagggtgtgcacttatttgagggctttgatgcatattactaaacagccctaaagtttacattattacccacgtcctgaggctgtccctatttcttggtaacctagccagtattgagagttatcacttttcctgtttataatttttatatagttagatctgtcactgttttcatttatggtttcttgatatttaaaaataaggtatttctctagtactttctatagttttattttgctttttaaatctttcaaattatgaaatataccatataaaaaacatggaacataaatatatagcttaatgaattatttgaaagtgaatattcgtaggaccaccacccaggtcaagaagtaaatattgccacgagctgcccatattctttcttattgtaaccttgaggctaactactatcttatctattagggcaatcattttctgttttttttttcccttagctttttaatacccagttattcacacctaagcactacagattattagatttgccttcatatgaaggaaactcatacgttaggtgtttgggttttcttttctttttttttttactgttttattgagatattatttcacataccataaaagacacccacttaaagaatacagctcagtggttttccgtatattcacagaactgtgcagtcatcaccacacctaattttacagcatttcaacatccccccaaagaaactccatgcctattaccagtcattcccattacctcttcctgcctccacagctccagacaactaatctactaatctacttcctgtctctatggatttgacagctctgtgcatttcatataaatagaatcgtataatatgatcttctgtgaattttctttaccatttcttctcaagcatgtctgctgctgacagagtctgtttccttttatgaaaatatccttatatttgtttattatacaattcctgaccaattgttcttctatttcagcacattaaagctatgttggtccactctctctggactcaatggtttctgtgaagaaattcattgttatttgaattagtgtttctgtcagtaatgtataggtttttcttttgctgctttaagaatttttttctttatatttagtttttggtactttgattatgatatgtttaagtgtgtttttctttagtttatctcattttgggttctctgagcttcttgaatatataaatttattatgtcttttaccaaatttgtgaaaatgtcagccattaatttccttaaataccttttctgtctctgtgtctttgttctctccttttgggtctccagttacatgtatgttagattttttgatattatactacagtttcttgaggctctgttcatttttttctatagtttttccctttttattttgcataattgctactggactattttcaagttcactcctttttttcttgtcctctatactctattgagcctatctagtgaaggttttgtgtgtttttattttaacttttgtttacttaataacatttctattttgttcttgtatcacttttctttctctgttaagaattcctgttttttttcattcacttcaagtatctttttctttacttcataaagcagagatataatagctactttaaacttataaaactcttttagtgacagttccagcatttggatcatttgttgattgtcttttaagatttggccacatttttctggttagttgcatgtcaagtaattttagattatatactagacattgtgaatttgtatgagtgttttaaatctgtttggttctccaagcctttgccacattgctttgaatccaacctgtgtatgcatcccttcgggtttagtcattgtgagacttgaatgtgtggtttaaatttcagttaagtttttaaaatctttgatatgctggtttgagggttgccctgtacatgcatagttcagggcttagactgaggcttgtacaaatttatacacagaattcaggattcctttctctggttcttttctctccgggagtcttcctacactctctttttatcactgggtttcagcaatctgacattggtgtgatgtatgctggttttctttgtgtttattctgcttgagattcaccaaacttctgggttttgtggggttttcattttcatcaaattaggaaaaatttggccattattttttcaaatatgttttccatccctctcctcttctgggagttcagttacacatgttggaaaatgtaatatgttctgtgtatttctgttttagtcttttttatctttgtttttaattatatagttttatttctatatctatgtgttcactgatcttttcttctgcagttttaaatatgctattaaccccatccagtatattttacatttcagatattataattttttctataagtttaatttgagtcttttctgtatcttccattttcctccacatattcatatcttccttaaccttctagaacatatgaaatatattaattctattgtctgtgtcattgatgggttagtttctattgattggtttttctcctggtatggttcatatttttttcctacttctttctatgcctgataaattttgattgaatgctagacattttgaattttgttttggatgccagatattactgtatttttaaaaatactgttgtactttttctgtgacacacaagttacttggaatcagtttgatcctttcaaggctttctttataggctttactacatcaggtttagaaaaggctttaatctggggctaattttgccccactactaaggtattatttgatgccctttaaattaggaagtctttgcattatggctcattgaaacataacatattcccagccttattcatttcctatgtttttttccctagccactcatacagaacagatctccagagctctttttctgtgcagcttctttttccccagtatttcttcccttcatattctagccactctggactccccaaattctgaattctttctctgaaactcagtgagattactgggctctgtttgggtttcacctccctgtgctatggcctggacactctccaggcagaaagctggggtaatcttagagctcaccttgtttgctttccttttctcaggaatccctggcctgtgctgcctgttgtctagtgattgaaaactattattttatttgctttatttggtttgctagttttttaaggaggaagataaaggttagtcttgttaattcattacggcaaggaagcagataatctctcaatctttaaatttattgaaactaaaattgggtttaaattagcatggttttatttttgtgtttttctagttactcagatattcacccagacttgtgttttagtaagttgaaaaaaataacagaaattgttggttaggatggctagtgtttagtattcttttcttccttaatatttatgttgtttctgttagagtcataaagggcatgtatatacagcatgcagttttccaataacacaaatgtaaattatgtcaaagttcacatttctaagctacttacagtgagcagcaggactaagcttgagaaggctcttcctgtgaataaacgtatttctgtatatagagacatggcaaaggtgataatccttgtgtatgacaacatttaaaattgttttgaaatactagtatataattgtataggtgacaaaacatgttcaccactgtggtcagtgcttttagggaataaccatgtctgatttattacttgatttaatgttaaaaatcacaatttctccattagcattgtacaagaagaagacccaaatgaagagctttcaaaagatgagttcattctgaagttaaaggcagaagtacagcgtttgctgggtagcaactcaatgaagcgtcatctggtgtctcagttacaaaatgacctcaaagactgtcataagaaaattgaagatctccaccaagtgaagaaggatgaaaaaagcattgaggttgaggtatgtaaagcctatagagttaaaaaaccatttttaaaaggctcaataaagaaaacttttacacttttttttttttgagacagggcgtcactctgtcttccaggctggagggcagtggtggaaacatggctccctgtagcctcaacctcccaggctaaagcgatgctcccacctcagcctcctgagtagctgggaccacaggcgcacgccactatgcctggctaatttttaaattttttgtagagacaggttcccacaatgttgcccaggctggtctcaaactcctgggctcaagcaatcctcccacctcaatctctcaaggtgttggattacaggtgtgactaaccacatccagcccttttacatgtttttaaattaataaacctttggctttcaggagtttatttgacatttttagaaataaagtttaaagaaggaaatgccatttttaaagggatactgacagtccctgacttaggatggtttgacttacaatttttagactttacagtggtggaaaagttatgtgcattcagtagaaaccatatttcaagtacctgtaaaacagttctgttttttactttcagtacagtgttcaataaatttcatgagatattcaacagtttattataaatgaagctttgcattagatgactttgcataactgttggctattataagtgttctgagcacatttaaggtaggccaggctaagctatggttttaataggttagatgcattaaatgcatttttgacttaatgatattttcaacttataatgattttattaggtgataaacccattgtaagttgaaaagcatctgtatgttttttctggttactcttggcacctagtaaatgagataccaattaggtaaaattcctttaccataaatacaaggaagtattctctgtaacaaggaatctgcatttctttaagattggcttttaccaatagtgctctaaaatctagttaaaataaatcctccatagaaatcctgtagtattttctatgagattttcctggcccatgttcttacaacaaaagtcattctatatgaggacattaattatatagtgatgatggtacagatattatatagtggtcgtggtactatgggaaagtacacaaaatctggttttgtcagtcattgaaatccacctctgtattcttcagttcggaaaatgaagctggagcactttgtgacacttttgaatttacagagccaatttcagacaaattgaaactaaacacatgactaataagtaagtcaaagatatttctgtaagatcatgctatcacagagatctttagggctgctctcctttatagatccttttttttacccttccatatttcacaaatcatcagccatctatactcccaatagaaaataatatataaaacacctaataactaagaaaagcaaaagaagagggaaaaggaatgtgggtagtatactccttttcctcctgggtggagataattgtttacttccttctttagtactgttttatctcctatttaaactaggagttgtgttcattagaacagttctgctaaagtatgtataatattctgtgctaattattgtggaattttgattgtggttaatttttatattttggaaaaacagtgtttttgctatcaaaatcttttccagcctgattccctcttctgagtaactacatttgatgactaaaacatagattttaatattaacagcaaatgagagagactcctccccgccctgccccctgcacatttaacatctttaaatcaagctgttttcattgttgccctacatttctttaaaaggatgggaatgaaagcttgtttctcaatttgcattaagacattagagtttattagtttaagcattttggtgggagtgctctaggatttaggatactagaaacctgattttgagtctgaaccttagctcagatatcttggtgctttctttgttctgtattaaacttgctaatggcatttgctatacagatacactttatcatgtgtagcagtagatagtggtcatgcattgtactgttttttagccttcccattttcctctgtagtctggttgatcaatagatcaaaggaataactatctcatctttgagtattctttttgtccagctactctattgccatagtgaattctcggtagtgtacatctaaactccaatttttctcaaagttacttcagctgtggactcaagtgatctgcccacctccacctcccaaagtgctcggattacaaggatgagccactgtgttgtggcaaagagctcagagtccaggtacacaacaagtgaaacggagtagatatatttttaaaatctttgtaacccccatcaatgaataaaaagaaaagtagataaggaaaactctcagaggaaaatatgcaaagttaaatgaacagataaatctgggaaggtggaaaaacaaatgaacaatgaaggtatataagaggttccactttggtggtgacacaagaaatacaaatgaaagcaattgttagatattcttttcccatcaaagataattatttaaagataatcactgccattggaggcaaagagagatgggcagacccatgtactacctgacagtatacatttggatgacatttctggaaggcaattcgccaaagtctatcatgagtcttaaaaattgtatgtattgaataaaatatatgtccgtgagtgaatgctgacataaatgaatacatacagaaatagaataaatgcttgatcttagtaggagaacatatgatgagaaataggatatttgtattgtctcaaagtatcctataagatacttatcatttattataaaacaaaaaatagtaagtttacaatggagatgacagatcccaccttcaattgattattaccagtggtgagacatagtgatatcatgtgtctcctgcaaagagcacatatcagttcttgacatgcatgccaaagatgcataacctgattttaataaacctaaaaactccaaattgaggaacatcccacaaaataacgggttagtattcttagaaaacatcatgggtttgaaagactgaagagctgtcctagattggaggagactaatgaaacatgacaactaaatgccactcagaatcatggatttgatcttggaccagaaaacagacatttggggcaaattggagacatttgtataaggtctgtagattacttgatagtattgcatctgtgttaatttactagttttgatgattgtgctgtagttatattgggggaagatgagtaaaagctatatggagattatttgtactgtttgcaatttttttaaagtatggaagtatttcaaagtgaaacttagaattttttaaaacttgtaaaacttttgaccttttaatattcagactaaaacagatacctcagaaaaaccaaagaatcaattatggcctgagtcttctacttctgatgttgtcagagatgatattctgctgcttaaaaatgaaattcaagttttacaacaacaaaatcaggtgattaaaaatattttttatattttatgagaatttttatttcctcattaaatacaaaggatataatagagtttttgcaaataaagaggcaatgtgagttagtagacaagtatattagcaggtgattatgagttccagttacttccctttgctagtgaactgttggttagtagtttcattggaaggtaagttagtgtagttccagttctctttctctatggtagcatggctgacagaggtattctttcctccttagccagctcttgacccagaagtaaaactttgcttatttagatggttgctgaagattattgaattctgagacttattttaaggcatcagctagccaatacttctctggttaaatattttcattttatatatttcaaagtaaatacaaaatttaaacgtttagtcctgtcagaaaactacttgtcaaataaatgaatctatgttcttatcaaagcgtgaagagactttttcttttgcagaattgtaaaaataatatgtcaaatattgttataggggagagagaaagcatagaaaatattaaaaaataagacaaaatcaatcagtgaaaatgatgtttattttctgtaagtactaagtttattcttttgtgtctaggaacttaaagaaactgaaggaaaactgagaaatacaaatcaagacttatgtaatcaaatgagacaaatggtacaagattttgaccatgacaaacaagaagctgtggataggtaaggtctatatagatgcctgacgactgtctcctgggtacccttcccctctaagtccctgcccttccctgtgacaaaaagattcaaaatgattgagtgatttctaccctgttgagatcttggattggcagagatgagtccctggcttctcaaattagaatttggaacacattttccatagaaacagtgttatgtagtgggttgggttctatagtatcattgaaactgtagttcactgaaatattataggttaatatttttttaaagactcgtctgggaaactattctttataaagaaaaaagtctgtgagagggaatatgtcttccaaataccaaatcataaacttggaaacagacttctggaacataacttacttgtgagttggggactgctagtatttgtgtttaatatagatgacttgaaattttggagccacaccctcaattattgccattaattttttataaacagaagtcctcaacatagattactatctctatttgaaggactggggcagtctcacatccaagtttctaattgttctctagaaacatttgaagaaagaaaattttgaagattctcataagattgttggttattaattaattattaccactttcagttggggaaaagttatctgacctcaattataatttgcattagagggaagaggtgaggaggaaggaaggaaaccaattcattttggtgttcgtagtgagactgggcattgcctttgattccgctctgtttccaggtgtgaaaggacttatcagcagcaccatgaagccatgaaaactcaaatacgtgaaagcctattagcaaagcatgctttggagaagcagcagctctttgaggcttatgagagaactcatttgcaactgaggtgagaataaagagtttagctgccttttaagctgtagagactacattcccctattccataatttagaggaaaattgtttgttatgcagctcttgtatttttttgtggttaaatcatttagttgctggttttgtgtatccaaggtctgagttggataagttgaataaggaggtgactgctgtgcaggaatgttacctagaagtgtgcagagagaaggataatctagaattgactctcaggaagaccactgaaaaggagcaacagactcaggagaaggtacagtacaagtttatgttgtatcgacatcctttcactcttcaagcctcagtattatcatttaaacgaatacatttgttctagagaagtgaatggagaaggtattcatatgttctctttacttttggctgtatcacactcatatagctcacaaataaaatacagtaattactgaaatgattattaaaaccttaatgtacaatggcatatagataggagaaagtgattttttttttcttgcagatttattctaaagggcaaaaaaaaaaaaaggatcagtgtcactttaaatctgaaaatcacagatcctcattttcggtgttgactgttcaggaaaccctatgtagtcctgtgagcgctgcacggagcattcgttcagagccctttttctcggatccatttctttctcactacctcattgtcattttattcttctggggagaagagtaggaatttgaatgttggtctcgtgatagggaaagtgatgatatggaggatatggacagcaaggtcagcatcttcgtatgacctccttcagggaagctggaggggctagagtagattctccaactctgcctgattcttctgagtcactcttggtgagtgtccaggagtaaaatcacatgtaaacagtcacacctcctcttttcttccctgtcctggcccagtgccttaacaggcctgactgtccttcacactttggaccagcggcaaaccacagtttgaaagctatctgcctcaagattagaaaatatttttaaatgcttaaataaatgttctatacagaggtttttgaataagttatgttaaagcaagctattactaccacacacttaaaaagaatagtaaagagcaggcgaggaattcagttcattcaatatcttgattattgttgaatagattaatatggtgaaaaatgtgccatgtatacatatcatctagtggaaaaagaacttctaaagggagctgttttaggtagggatggcagtataaaagtgagaaaggatcttatattaccttgaaattgaggacttagctttcagtaatgttttaaaaattaaaatagggaaatcactagtgtgattcttttatatgtataaaaattggcggccgggcacagtggctcacgcctgtaatcccagcactttgggaggccgagacgggcggatcacgaggtcaggagatcgagaccatcctggctaacacggtgaaaccccgtctctactaaaaatacaaaaattagccgggcatggttgtgcgcgcctgtagtcccagctacacgggaggctgaggcaggagaatggcgtgaacccgggaggcggagcttgcagtgagtcgagattgcgccactgcactccagcctgggcgacagagcgaaactccgtctctcaaaaaaaaaaaaaaaaaaaaaaaaaaaaaaaaattggcaagaacataagaggaattttctcaaagaggtcattccaggaatattttctgatacttttaatagaatcaatttgactataaaatatgatctcatataatgggtcagttacaattagtatctgctattgactgatattttggctcatgagtgtttgtacacaagtccaagaagaaaagttaaactgctatttgatccttcaaaaaaaaaccaaacttagaggttaaatttttcacgtgtatcccaaaacttaaagtataattaaaaaaaaattttaattgttatacagtaaaattgacttcctcccaccactgggcgtatagttctataaacctttaacacgtttatagttttgtcaggatacagaacagttttatcaccctaaaacgctcccttttgctatctttttgtggttacactcctcctccaaacccacccctcacttaaagggccagtgtacttaaagcattagaagtttaatttcttccctctctgggaattcattagttttttactatagaattatataagcccttagtagtataagccagtcagaactgaaacatctttatatttaggagactgtctaatcttctcacatttttcagaggtaggcaaaaatacaccttttttttttttttaaaggaaatgtttcacatacatgggagaatgttactaaactctagaacaagtgagggcacttctggggtagctcttccatgcaggacataagccattttactgcagcttagctttaggtagggaatttaacctggatacagaatatatgagtcaggtaacaataagagttaaagggtgtttttttatgtttcatgcattgttttctgaaacacttgctgagtcaggttgcaggttaaataggagctcaattccaagttttaaagcttttagtagcacacagaactttcctcacatgttaacctggctcattgagagaaagggggaaaaaatcatatacacggaatccttcaggttgggtagtaatcagtgaagcctatgaatttgcagacaaggcaaagatggtcaacattcccattcctgatgccatttctatgcacattaaggcttatttatacaattgtaatatgagttaggtaggtgcattttagaagttagagggattttttttgctatccaagacacgcacaacaagttcatgttttaacttggagactgttagtgttgtagagagatgtttatttgaattttgtttaaagagacagctattggaggaaagagaagaatatgtaagcaaactgcaggtggaacttgaaaaaaagtaccaagatacacttatgatggaaaagagcaagtggctgaaagatcaagaaactgatattaaacagcaagttgaaagtgaagtgatcttagccaaagcacattgggataaggaagagcaagaggtgtggattaaaatttctttctggtcaccacatttttaaaatgtggtactaactttagaagacaattcttcttgaaccagatacgtaatttttatttgccaggcacttacataatcatccattttaccttttggaattgagctattagcagttaccacaccagttttatttttaggaatttagccacctcttgacttttcgacccaactcaggatataacaagttttttgggcacttctttgattcctcaaaatgaaaccatgatctgatttcatattgtggaatgattataactctagactaatatttataactaacaaataagccatatcatggattagaaacaaagaagtaatgggcagtctcagaagcccataatttgttacctctattacttaaatagcaaatgagattaggaaatgctaatagttccctagcaagttagggaacaaagtatgatcctaaaagcttatttagaaatgaaaacaaaaaagaattctcaagcttatttaaactaaattttttttttccttttttgagacggagcctcgctctgtctccaggctggagtgcagtggtgtgatctcggctcactgcaacctccacctcccgagttcaagtgattctcctgcctcagcctcctgagtagctgggattacaggcaagcgccaccacacccagctaatttttatatttttagtagagatggggtttcgccatgttggccaggctggtcttgaactcctgacctcaggtgatccgcctgcctcagcctcccaaagtgctgggattacaggcatgagccactgcacctggcctcaactagattcttttatctacaaaatggctattaattgctattgatctggtagccagggaaacagtaggagaacttcagatacccaggtggtgaacagaaaaagggaaaaccaaattgtgcagtttcatagttttgcctaagactgtgtttagctccacctcactgtactgttaaagtggaaaaatcattaagatgttcttccaataatactgcctcccttttgaatgtagtctacttagtaaaatttaacactataacaaataagattctaatgtgttcaagtgagtaaaactattttttagattgttcaggttttggttcgttaattagatttactcggtcctttgtggagagcatggtgttgatggcaaaacacattaactgtaatttttttttttttaaatcctgccatctttgtagtggcaataggaaagattccagaaggttggatattaagagcaagatatcctgactttacacaacatacttaaatctttcatgtgatttttgtcatatagttaagttcaaagagtaactttcaagttttacttgagagtgtattttaattgactaaatttctaaaccttttataattactacaacaatatctagatggttttcaaacacagctgtggttgcttttctggctagcttttaattctagtttttacttatttgaaaattgttcttctcgtatgatttttcttctgaaaacagatcaaagaaaaactcattcaacagcttgaaaaggagtggcagtctaagctggatcaaactataaaggcaatgaaaaagaagaccttagattgtggcagccaaactgaccaagtaaccaccagtgatgttatttccaagaaagagatggcaattatgatagaagagcagaagtgcacaatccagcaaaacttagaacaagagaaggacatagccatcaagggggctatgaagaaactcgaaattgaattggaactcaaacattgtgaaaatattaccaaacaggtaaaaggcagatttattctagtaaatttattggaactgcctgtctcttaatgaaaacccatacaatgctatcattgaactcgttcataactttatacttttaagattttgtgcatttctaggatagaaaacctgtcatgttcctaaatttttcttcataatatttctgtcataaagctgccacccctcggtttttctgtatattctttcggtttacaaaatatttgctcctttgagattagtctaagcattaagatgcccaaggttaaagagggtgctttttacatctgaatgaatcacagtttaattattaatctttcatatctaattttttagaaaatattccactaaggtggttatagataagtaaacctaagcacataaggtatttaacaacattgtgtggagacttgatgtggttggatctgcaggcgtgcccttaaatggaactttatctatcattcccatcagctttccaaaagtggtgccaatacctttcctttgaggcactcacaaaactagcttttaactgacacagttacttgatttgaaagaaatgtcatactgagaaaagtacagcctattgtgacagaataaagatgagttatctgttatatctttcttacctattacagtgattctcaaaattttggtcccaggactcctttacaattttaaaaattggggactctaaagagcttctgtttgtgtggtttatatttacactattggaaaatctgagaaatttttaaaaaacaaaaatacccaagcacacattccactgactgtcagaacaatgacatgatcacagcatgcagcttttggagaactgtgctgtttatgcatgagagaacagcaataaaacagatagtgtcttaatattattttggaaaaagttttgacctcacagactacctgacagggtttctagcctcaagagttccttggactttgatacatccgttatgtagttattttaattttattacttattataaactcttaaacaagatagcactcaatgtaaagtttttgaaaatacactctacttttgataaatacttgaaattctgcttatttgttacattgttctacgtgattttacagggcacctttaaagtctggaaatacaggcaaatatatgtaatggtgccaaggatatcttcagttagtttaccgaaatgtttactgaagggggtttcaaaagagttaagaaaacgttccacagacaaaaagttgagtttaaaggtgctgctttggtatttatgaaattattaatcttaaatagcataatacagcagaaaggaaatatttcataataactttttaagtagataaatttctacaggagctttatcttttccccatttcttaactccttggagtttgtacgtagacagagtttacacattgacatatttagcactttaacgagaaatacagcctcttatatcaaccctgcttttgtgttgtatgtacgtatatatacatatatctgcatatctgtgtgtattttaaaataaaggaataaggtaaaattatttaacataatcttctggtaactagtggcagatttacaaccagatgaccctcataattaatcaagtcttaattttttcccttcagaggtatcaccctcattctttagtataaactcattctcgacagtaggaaagttcgcaggtgtagggctctaaactagatcagtgtatgtgttcatgcacatgtgtagagcatgaggagtcaggaaggtggtgggtgtagtgattagacagcagttggcaccaagcagtcctccaggaggccttctctttcccaggataaataggagttgttagaaatggtaattggtacctcgtatgacactttctaagatagtactggtcatcaaacattcacagattcccacttcctctgttgcatttgtatgggatgctatgggaagtttacaacaaaaggattagaatccactgtttgggataggtagggtacttgcagtcagtttgactttattatgtagtgatatacagtataaaatactgaaatcataattgctgtttaaaaatgggatcttttttaagttttatacttccctttacctctttcttttgcaatgtcctacaggtagaaatagctgtgcaaaatgctcatcagcgatggctgggagaactaccagagctggcagagtatcaagcacttgtgaaggcagaacagaaaaagtgggaagaacagcatgaggtctctgtgaacaaaagggtaagagctcttctgcaaagacacttcaggaggctgtcttacctgaccccttctcttatctcagtccttggaatttgtacctactcatagaattgttgaaggataaacatgttgatacatgttaagcaatagctcaaagcctagcaagtgttcttgtcatcatcaagttgttcttagagaaagaatgtattttcctatgaggataacttagaaactatttaataactcccattctatcttgccctatctttagatgaaattgagaacaggtatatatttgtttattattagctatacagtatcctttcacatgcttaaagattgttttctctgttgtgttagtagtcttgtaacattcttcttggtaaatagccagttctcctttccagaaatgtcatgtttcttgactggaaaatacagatattataaccatgtgtactcttccaacttaattactggtttaaaccaattctaatcaaaatgccaacaaactgaatgtatttgaagttgacaaaataattctataaaatgtttttggaaaaataaaaggactagatgttttttaatgttctggaaaaattatagtcaagccctaacacataatggaatatattggaaagcaacaactcagactgtattgagtcacaaaaatagaattcattttaattcagtgcaatacaggtttcagaggtaggccctactataaataaaagcttaataaattgttttaaaacaagggaatgaggaattatttcataatagtcttatgatagccaggtaacactttggaaaaattaagtttacccaacgtgtatcacaataaattctaggttaatgaaggagttaaacatttttaaataaaagtgtagaaaaattaaaagaaaattgaagatttcagatctgtaccataataacaactcagttttgaggcaacatatccaatagcaaagataaagtaataggttgaaatatgttttgtttttgtagtaaaaagtaaagggaataataaaaataagaaaaatggataacacatgataaattataatctatattttttagtatgtctgaaatattttaaaaggaaatttaagagggagagagagaagaaacaatatgattgtgaggatatgtgtctcagagctcagaagtcaagtagaatagtaaagttgagtacaatgtagaaaataaaacaggccaagagatcttttcataagaacatagaaggctgtatgtttgtgaaagcagacatatagaaatgagagaaaagtgtttttgttgcttctcaaacttcagcaggcctgagaatcacttgcagggtttgttaaagcatagctatctgggctttcctcctagagataatgatatagtaggtctggagggtgtcctgggaatttgcctttttttttttttttttttgagatggagtcttgctgtgtttcccaggctggagtgcagtggcacaatctcagctcactgcaacctctacctcctgggttcaagcgattctcctgcctctgcctcccaagtagctgggattataggtgcccgctacctcgcctggctaatttttgtatttttagtagagatgaggtttcaccatattggccaggctggtcttgaactcctgatctcagatgatcttgcccacctcggcctcccaaagtgctgggattacaggtgggagtcaccgcacctggctggaatttgcatttctaacaggctcccagctggtctttggactacacttggatgtaagtagcactattccagataattatatcagccacaaaaaataatgtcaacatgttgtgcatccttcctccaaaccaaaagaggtccagaaagggccggttccatagcattggctatagagttattttaagattagagtgattagttgagatctgtgacagtgtgaagacagtttctagaattcagaagtagttaagttggttcagtggttctcaaactttgctgcacattggaataacttgaggatctttaaaaaatactgttgcctggcccctacccttaaactttgttttgtatgggccctggcctgggcatcaggatttttaaaagctgctcaggtgattctaatgtgcagcaaagtttgggaagcactgagttgatgaatgctgtcaaattctctttgtaaaacttcacatgagaaaatgcacattttggtaaggttgggcaggttataaaaattctgtggaatccatcacctctatccgagtcacctgggaatgacttccaggcatccattgcaacatgacctgttttctctaaaaacactatttaaacatgtttcaaatcactactgaattattctgctggtagcaaaggaattttgcagtgaattcttttgtaaagctcaccttagatagtgggttcctttagcagaaaatttatttagtaggtactctatcccatcatcccagccatatatatagtattgatcaatggtaaccaccattgtctaggccaagcctttggagatgcccagttctgtcttttgacactagtgcgtccttgtgccttctttgaattcagttaggaattcagtcaggaatattaaaagtgaaagggactcaaggccattatctactctactcctttatataggtgaagatgttagtgccaaagagattaagtgacttttgcaaggccatgcatccaaaagtaataactacataagatttattgagtccttatcatctgccaggctctgggctaagtactttaaatggattatgtccttatgtcatttaatcctaaaggatgctatcaaattggcattgtaattatccccattttatagatgaggaaattgaggctcaaagaagttgaggaatgggcctttagttcttcagctggtaagttaattccagcagtttgtctccagattctgttctgttaagcatctgtgctaggcttcctctgcaaattggtgtcaggattggagcttaggttttttgatttcgctattactttttagttatgtactacctgtttttttctgtgatccactagttctattattctgtcatacaaacaaattagactaatgaaaaatgactttttctgtttggtattgtcctttaatgaactgttctagccactaaaagtgcattaaaatacagttacacttatcagcaagtaattatgcaggtgtgtgctatattcctaagtaatagtaaaaaatccttatgagtccgcttttgctttaggtaaaagatacttaatttgttgggggcacagataaaatttgagattgtatctgtattaagaaaagtaatatgaaattttttctcacattagttttggctaattatataattatatgtgtgagtgtttatgtgtctatacatacatataaacatatttatgtatatattttgaccaattttagtgtaagtatagtttttagaataatgtcttatctaaaatcatgtttccttttaattttgattttacatttcctagcttcagaggttaaccaaaatagttaccttaatttttttgcgaaggaggagaatcataaagactttcaaaatgcatgttgttatgttctttagatatcatttgctgtttctgaagctaaagagaaatggaagagtgagcttgaaaatatgaggaaaaatatacttcctggaaaggaattggaagagaagattcattctcttcagaaggaacttgagttaaagaacgaagaagtccctgtggtcatcagggctgagttagctaaggctcggagtgaatggaacaaagaaaagcaagaagaaatccacagaatccaagaacaaaatgagcaagattaccggcaatttttagatgatcaccgaaataaaattaatgaggtgcttgcggcagctaaagaagactttatgaaacaaaaaactgaactacttcttcagaaggagacagaattacaaacttgtctagaccagagtcgtagagaatggactatgcaggaagccaagcggatccaactggaaatctatcagtatgaggaagacatcctgactgtacttggggttcttttaagtgatacccaaaaggagcacatcagtgattctgaggacaagcagcttttggaaatcatgtcgacttgttcttcaaaatggatgtctgtgcaatattttgaaaaactaaagggctgcatacagaaagcatttcaagatacacttcctctgcttgtagaaaacgctgacccagaatggaaaaaggtatgttcctgagagtgagagaaggtattgaacaccaagaatgattatagaagttgtatatagtgttttttccttttttccttttaaattttagtagatgtaagtcttatgtttttgtcagtggtttaaaaaagtttctgtagcgaaatccaaaggtttgcatgtttcgttgccaaaaaactttactacttcatagtgtcacaaatacaagacaagattttagcctctaaatatctttttcctaaagaatatttaggacaaatacctaatgcatgcggggcctaaaacctagatgacaggttgataggtgcagcaaaccaccatggcacatgtatacctatgtagtaaaccttcacgttcagcacatgtatcccagaacttaaaataaaataaagaatatatgctgttctttctaagggcctgagatttcagaaactgaaaatttttttttcaaaattctgttttctgggcctgaccacttcatgaaatatgcataataagagtttcttaaaagcttgtaaagagtttggaagcctatttattgccctcaataaatttatgtctcatttaggcaaaaaaatgccaaccaagtacaaaggtattgatatagaaacaagcaaataaatacgactcactcgcataaaactctgaagcccagtttctggatgtactatatatgtgcatatagaattaattatattcttttagttatataagtactctctgagaccagcttttaatttgtatgaaagtttcagtaaaaccaaattcttgctaccttatgatcaaagcaattaggtatgcatgaaagatccagaatgatattctgagcatggtgattagccaatttcaacatttgggattagaggcaggaaaaaaaaaaaagccagtattataaggtttgtctaatagagttgagacttaagagtgaagttccatcaaaatattgtgattaaggagtttcaaggccaggattgagcatttggtattaatacctacttgggagagttataaactagaaaaaataaccttgagtttcagttccatattcgatgataactagattattatattgggcaatcacatagttgctcactggaaaaataaaatacaaatccccggcctaattccttgggtttgggtaggatatgcatggcacagcttagcctttctgggtcctgcatttgaaacagtatagaattttagagccagaagggacctgaaagatcagctcactccatcctacttcaccccagttgatatttttatccttgacctcacaaagatgttgctaccgagtagttgccttcaatgtaaaatttactgggcaagatcacttcccatgaatactgcttcacacttaattgagattttttggagaaaataattaaaataacttggagaaaacatataattaaaaaattatagcagatttggagatgagaaatgatgggaaaatcatgtttacatgctttcgtttgtaagcatgtttcgatttttataacagttataaaatctgttataaaaatcaagaaactatgacacctttctcctaccattaatatatacatataaaatcaaccctggagtctttttacagggcttataattgtgcaagcagtataagatcatctgtgtgacttaatgaggctcataagtctatggagacagaatcacataatctggctaagaatttagatgtttacggcttttgttgggtgggtcagattccattcctgagaaaaggatggctttgaaatgcctaatctggaatttgtcatagaagtaatacttgaccttctgccattttcgagctatcttcactcaggaccttgaggtaaagctatgattatagagcagtgattttaaatttgttacataggtgctgtaaatgtgaggaactataatttataatttattaactctctagttttaaaaattgttcatggaaattaaaacaaaagatggtttattaatatataaaaacaagtcctcattaaaataactgagacaatcaaaagtttttttaaatggagaggatgcaatgaatgaaaaatatagctttcaagaaaatgaatgccatatcaaaatatattaatacagtagttcataacagataaaacaaatatcaaatggaacaaaattttcaagcaaacttaaggatgtatgttgtctcttttaccatcaaagtcaagttaaaactgagacaaaaaggttgttgcttttctcccttttctgttatcttgacttttcttccccagttttgagtaaaaactggaagcactgactgcattttggttcagcttttcctactccttttgacctcaaacccatagcttcttgattgcctcttctctataattgctaacctctgcttctgttggacattgtaagtaggttttctgacagtcaattaagtggtttctcataatcaaaatcaaggcttctagaatcaggcatatatagtatgttttaaataatcagtaagactactttctccataccacctattctgttcctttccgatttagtagtcatcttaaatctgaaaacattaccataaaaatccattgatttggctgagcgtggtggctcacacctgtaatcccagtactttgggaggccaaagcaggcggatcacgagggttgaggcaggagaatcgcttgaactgggaggtggaggttgcagtgagctgagatcgcgccaatgcccttcagcctggccgatagaggaggactccatctcaaaacaaaaaccaaaaatgaaaaatccattgatttagtagctgtattgctgtgacaaggactggaacataaaaacgttcaataaatattagtgaagaaatggtcttgtgcaagatgtttaatttagctaagcctcagtttctgtccttaactttggcattcagctggccttccttacaaaattactgtgtatgttaaagtatttagaagcatatgaagtactatataaatttaaaatgatttttaactgttattttcaattcataggaggcagagggttagcattatacttgctaattaacttgttccttgctgtagtaaaaatgttctagattttcaagaacaattctgattttatattgtctttcatgtggtttaatcacgtaaaccattgaaaaatctcaaattcacatatataatgtgcaaaccatatcttctgtctgtctcatagctgcccaccagtcgcctgtcagacagtgttcttatttggaaagtttcataggaagctagttcctagtacagtgacagtacttatataacaccctaagaaaaatattggcgatagatagttcaggcaagatttttttcaggtagtgttttctctttgtatttttaatattagcattttaaatataaaattgtataaagatttttactaagcattaactttgaagatactttatttcagagaaatatggccgagctctctaaggattctgccagccagggcactggccaaggagaccctggacctgctgctggacaccatgctcagcccttggccttacaagcaacagaagcagaagctggtaattggattttgttcccaccagtctttgtagcatccataatcacccatctgaagggttgctttgaggataaaaggagatcatagatgtgaacaaatgggtaataatcgtctgacttaatgtcccctcttcctagatttcattttgtatttagataagagggttaatttaggccctcttcttctatttatggttttcccttcattcacaactgattcttgttacaaggagaatcatgagagttttaatggagaagtcatgtttttattccctgaaatcaagggtttcacatcagagaattgccaagtaatacagactttttcattcaaattactgaaactaatttcaatcactttttaatggaaatctttctgaaatgtattagatgttttctaattgatttgtgagtttttctgagggcctgggcagtgtttttaatctcttcctttccaacgtatggcagagtgatgaattaatagtttaacttttccttaatgacttagactcttcatcatgacaaaagaattcttatactgtactagagccgcttgtattcagagcttactgaggagtataggacttatattgcctattcatggagatttcagagctagaaatttgcaaatcctttattagctcccatctcttttagcttcttgaccctttgcagcctactcctttcctccccacacaaacgcaacagcctctctctgctgcttatttgctgtttctaatgtaacctggaaaagaactaataattgccaaggccagtcatacctactaagtaaataacctcagtttgcacacatttctaattcagaaggcaatgttaccagaatcttagagaatctctgcctataccatctctgcctttctcattgttcacaaacccttttcccctacttctaggttctaggtggctgagaatatcttactgccaattcagtggatgataatattaccttaatttgtattttgcattgtactttttatgccctgtttggaatagcctgagaattctatcttaatctgtgaaatgaatgggtagaaacaagttttggatgttacttagctttaggaagtcctataaatataaaagcaattagttttggccaaagaaaaatcagactataaaaatatttttctttagtcttttttcccttaaaaacaaacacattaataaattcattagaaaggattaaataatacaaaacatgtattaagtgataaagtcctttaaaatcctaccaccagagagtaccactgttggatgtttggttatgttgtcctaatatctcattattatttgaagtacttaaaacattaattatgaaatacttagttcattcaaagaatatatgtatgcatctgtaagttatgaagcctagcaaccaggaacccattattcagcttaaggtacagaacatcaccagtgctgttgaccacagttctatgcctgcaacctctccccagtctgagctaacaaatattctgattttcaaaaattactgtcttttttaatgttttaattatgtgtatgtaccctcaaaaagttgttgcctttttgtgttttaacattataaaaatagtttaatactctatattctttgtaacttgcttttttcctgtttaacagcatgctactaagatttgtctgtgttgatgcaatagctctagttcattcattttcattgctacatagtatttcagtgtatgaatatactatgagttatctgttctcttgttagtggtatttgcacgagttccaattttacaacagtatcctagatgaaaaatataaatgcaatttatggtaccattgtgatgtttcattaatcctttaatgttcattaacataaatggcaccacttaaatcaaactaaaatgtcaggagagagctaagaataattttgctggatcaatgactttacagtaacattttggcccctgagcctgtgctaacttgtattcctgctttattatatcacttatgttaatagtctactttttaatcatttttgtatattttaattttataaattttatgtattactaatgacaatgtctgttatttattgtgtacttgctctgtgccagctactgtgccaaacagttcttatatatttacgtcttctaaaagttttaaatcattttttaaacttggaaataatttcaaacatatagaaaaatagcaaaaagaaaaatagttgcgaagaacattcacataccctttaatgagatacacctattattaacattttactccattttgtgctcttatgtatatatgtgtatgtgaatatttcatttttttatgaaccattggagggtaagttatatatacattgtgacttttatggctaagtacttcagactgtattttccaggaatatgaatattttcttgtttaaccttagtacagtaaatttaacattaaagtattgtattaatctactgttgtattctaattttgtcaattgacccaataatgtcttatagcattttttttttctcttccagtacagacgtttgtctagggtcagctgttacatttagttgtaatgtatctttagcctcctttaatctagaacatttccacagcctctctttgtctttcatgacattgacatttttgagaaatattctctgcttccaccttcatttttttttaacagaacttttctcatttggggtttgtctggtgtttcttcatggttgattcaggttgtgttttctcagctggagcactgcaaggggtgatatgttgttacatctaaaaattgtggtgtccatatgtcttattggtgaggttacttttcattacctagtgaatatgttgtctaatttcttcactatataattactgtttttttttcacccttgcttatcagttgataagcaatctgtgggagacactttttaagaccatgcaaatatcttcctctcatgaaaaccttctcttatatttggcaaccgttgatgattcttgcttgatccagtctttactatggtggttgtgaaattataattcttccaacttcctccctctatttatcccagttggcactaagcatgttgaatcaagaatcctttcctctcatttgtgtatttattttatctctctgtccatcgatccatctacctacctacttaccaacccacttacctacctaccattcataaaattattggtatgactcataaattcctatttttaatactttataattcattactatatttcattagtgctcaaattgtcccagattcagctagtggagctccttcaaactggctcctatgtccttgtgacatgcctgtatttttgagtactttcttactttctggcataggaagatatttcagtcttattttgtatataccctccccagtactggagtcagccatttcttgaagatccttgactccctttagtagggaatggtattcaataccaagatccagagcaataggtttcatgactatttttaaagtagatggtagtatccagtagtgccttagacaagttaattaatatgctccaagtcacacagccagtaagcagcagaaacaatatgtaaacccatgtctctctatcttaagcatcacactctttcagtcgtgctgtagcctttagtcatgagtcatctgcttttctttctgtcttttttttttttttttaatgatagttcttggtctaaactgatataaaagttttctgtcatttaatttttgcagataagaaaaaggtccttgaaattaaggatttatgctgtggacactgcttccaagaacttgaaaaggcaaagcaggaatgtcaagatctgaaaggaaaactggagaaatgctgtaggcatcttcagcatttagaaaggaagcacaaagctgtagtggaaaaaattggaggttagcatttaaagtagcactgctaccaatatgaatttctttgatccttgttgaaatgttcaaatgtgacattttagttaatgtgtgcactgatcctcttttgggattaatataaactaatttggatcttatttttactaatcaaattattattacaaaactcaaaagaggaagatttcagctctgattaaaaggtcacattcctttcttcctttcttgattaaacagatattgagggcccagtatacgtcaagcaggcttctaagcactggggatgcagcagtgaataaatcatacaaaattccagttctggtggagatgtgttcccttccttcaagaagcttttggttaagtgaggagatctaacaacagattaacaaataattaaacgttgaatgctgttggcagtgttttcctcagaaagaggattgttaattctacctcttattaaagttaagaaaggtttgactaagccttgaaaaatagaggtgtttgccaaggagaacaacgtttgagatagagggaaaaggcataaacaagggcgtgagggtctggactggcctccttctagtccattcatcacaatgctgtgagacatttggaaagggatattttctaccatttcccagtgcccctctgaagaagggaagttttggggcttagatcgctgctccctcttcttacctttcactatcgcttatagcctatacgctatactctacatttgaaatgcttccgattcctgagctggtcctatttcttttactgctggaccttcattgcatatgatgtttgtattctgtcctgtacttttccccaacattctttttagtcttactctcatcctttaggattcaactcagaagatgctttatctgcaaagcccttcttgattttccctagtcagggtgaagtgggctgctcttgtgcggccctgtagcattggctcttcctctattatcaccattaccattctgtattgtaattgtttggtcacttgtcagataccttctccaaattctccaagaattttctgaggagaaggaatatgccatatcttgttcatcctaatagccatggtgcccaccacataccagataataaatatttaaatggacaaaaaacaaaatgccagggtcctaaataatggtgtcattcagaaaagaccaggttaataagtttattttgtacatccacttctttctcttgcctggacactggcaataattccctgactctttatgcttctagtctagcccctctaatccattctccatagggtagctggagcaacctttttaaaaagtgaattgaaacatgacactcttgtttaaagctcttcagtggcttgccatggccttcagtataaaaccaaaaacacttagtttaacggggtttgaaaagttcttgatccagcacctgccagccccttcaaccttgtcttcccccagctctcttaatttctctcagtagagccatagcatggatttcattgttttctcccttcaccaaaacatcctgatctcatttggctggctaactccttctcatcttttccccaatacattacttcctcagggaggctttcctaaccactgcagacctgtttagtcctcctgttatacactccccatagttcctatgctttttataacattcaccatccttgtaatcatttgctgtctgtacttccctttggagtgtagtctttatagcaataaggatcaagtcctgttccagcacttagcacacctggcaccatagcacaactcgggaaatactgctaaaagaagccacctgtaactaccactgactgcttattactaaggcacttattactcttagtacttattactaagagatagataataattactttaagaccagaaagggttttaagaattttgagattaaaaatttaacaactgcaattcattttgtgattacttagctctttagtagaggccaggagagtaaatgagttatttgtccaactgtagtatatttaaaacatagatatgttaaaatatgatgaaaaccaagacaatttgttttacagaatatggcgataagggcagttggatatgactattatttataaataataatatttagcaccatactattctacacagtgttttttgaagctgatatcttctaaaactcgtagacttgcaaataatcgaagaaagttgatatatcactcaaaacaatgagttgatacaaagggtctgggtcagaatttaagtcaatagtttaattgaaattttttcttaatataactttagtaggttattatatctttgctattgagattgcttctttgtttcttaaattctatttttccactttcttggtagcgtttattaaaaaatagatggggtgggagtgagttgtttaaaacaaaaagttatatccatcaccagggggaatagagtaattttgttcctcaacttacggagtgttgagagggtagcatcacaggaaacacgagatgccatgttcacatttatattggtatttccaggccttgtgtaggtgttgtgcatttgttgttttatttctattataatctgtaagttaacatgtgaagaaaagttcagaaaggttaatttttcctaggcttatcaaccttgtaagcagcaaagttagaatgtaaactgatgtctctgactctgaaattcatgtgttttccttcataccacatggactcttatcagtttcctcatcctctttttaaaagttcaaagaattgtaatctccccacccttaagaaggttctttgtaactctccccacccttgagaatgtactttgtgagatccaccccctgcccccaaaacattgctcttaactccaccgcctatcccaaaacctgtaagaactaatgataatcccatcaccctttgctgactctcttttcggactcagcccgcctgcacacaggtgaaataaacagccttgttgctcacacacacacacacacacacaaagttcaaagaattgaaaatcttacattatttctgaaaaagacacctacttaaggttaactttctttttgttttatatcgaggtgcatgttcaatgatcgtttatatgagcataaactgtctaccaggatccatagggaacatggaattagaaaacctagtaggtttctacagagcttcagcacagttggaaaacaaaacacaggcatctgaaacagttgaaacccaattccaggacagtgtgtaacccaaagcaagaagaagatgggatacagattttaagtgctgagaaaacagagcaagggaatggtctgagtagggtttctaaggggatgaacgttacagaaaagcgactggaaattgcacagtctcttctataaacatttgtattgggaacttaagggaaaagaaggcttaaaaaatttttaactgtctaatatactataaactttctgttatagaagagaataataaagttgttgaagaattaatagaagaaaacaacgacatgaagaataaattggaagaattgcaaacactttgtaaaacaccaccaaggtatacttttactattttaaagtgctattttaaagaaatctaagtacaagtatctttaaatttttttaagtatcaattttttttgttatacagcaaaaagtataaaaaagaagaaaatcccccaaaaccttatttcctgaagataccctctagtgacctcttgttttatatcatttaagcctctttctacacatactccacatgcacaatgtgtttttaaaattgaggctatagtataaggtattttataactttttattaatattactagataagcatttctccatgttattagatattctcctacatatgtttttcaatacctgcataaattttcatgtggatttactgttatttattgaagcaaccataacatttatgttgtttccatttttcccctattttaaataactgtatagtggagattgttctagatgagatttttagcacttctcagttaactttattagagtatatggatacatatatatttttcaaatgaaatttttcacttaccatttctgtttttgtaatctttggtttgttttttaggtcattgtcagcaggggccattgaaaatgcttgcctgccatgcagtgggggagccttggaagaacttcgtgggcagtacattaaagctgtaaaaaaaattaaatgtaagtttaattctgaagattttaaggatggcttgggccttttttattatcactgttaaagtaaactcagagtttaccagcagtagttcttctagggaattttccaaattacctttttcttcaatcttaaaagagattattgataccttttcaaaattatgtagtcattgatcatttttcccaaataatatcttttggaagtgatgtgagaatcgtcttatgtttatattgttgattttcttgtttctttttggacactagtattaaactgaaaagttaataatcttacaacttaactaatttgtagtaaagaaaatgtcacatgggttttaaatgagcaattaactattacttcctaccataaactttttttttttgagacggaatctcactctgtcaaccaggctggaatgcagtggtgcagtctcggctcactgcaacctccgcctcctggattcaagcaattctccagcctcagcctcctgagtagctgggattacagacatgcatcaccacacccagctaatttttgtatttttagtagagacagggtttcaccgtgttggccaggctgatctcgaactcctgacctcaggtgatccacccgcttcggcctcgcaaagtgctgggattacgggcgtgagccactgtgcccggcctcctaccataaacttttaaggactgtagaagtggatctagttagcaattgttctgttgtttctggttattatttctcatagctataaatttatcaagtccttgtcagtaccaggttgtgccagcatatcctgtagagcattctcctgatgtgtgttttccctgttttgaatacttcttggtttctaattctaatatgcatagaatggatatatgtcccaaaacaataagtagtgtttatataggaaaaatgtatattaacttcctaaaattacatttctttttaacaaaaagagcaggaaaagtctgaagtttcaaatataattggtagattcagaatcacgtgtagatgttctacaaagctcattcggtatttataagggaatttgcttctccgttgttactggtgctaataaagggcatattgctacaagcaacgcaactttttgttaataatgtattaattgggaagtggaattttaagcatgttttcatcctaatgtgataacttgtatgtatgtgtgtatattatgttttagttattttttagaaagttggttggaggttttgttttgacatgtactgcatttcattttccatttcaaataatgaaaaacagtctcccagttagtatttttgcatagaaccactaattttcagatgcttactgacattaacaggaagattcctgtatgaattggtatccttaatataacagagatggtgaaattctagatgtaggatgtagtcttggatttattaaaaaaaaaaataaaagttagccttagctaatagtagtcctaatcaaagatatattgagttaaaaaaaaaaacttgaaagctgtgggctatgtttatatgtaaatttcagaggccaactataagtcccatcaccctccttgtagtctcattttgtacatatctcttatgaattgtaatattatatttagttagatgctcaaaaagtgctgctgaaagaattttcaataaataatggaacgtaaattttcagagcactagagaagaatgagtctctccagctcatactgcctccttttcttctgtctttgtgtttgctttttcctttctttctgcttaaccttttctctatattttatttttctcttttcctaactggacataatgtacaattgaaatactaagtttctgtacctcatatttacagtattttcttcgctaagtgttttagaatatgacaaaatttagctggggaatatgccatgtttccttactatatgtagctgtcatcattccgaaagaacttatagagtacttctcatttgagtctaccaaaatgatgatctaaaatattccattttaatgactgtggaaagtataatgtttaaactatacttaaaatcacttcatctaccagaaaattgatctgaagtctgcccctcctgtttctgaaaaagtgctaataaacatacattctgtgggcattttctcacttccctataggtgacatgcttcgttatattcaggagagtaaggaacgagctgcagaaatggtaaaagcagaggtactgcgagaacgtcaagaaaccgcccgaaagatgcgcaaatattatttgatttgcctccaacagattttgcaggatgatggaaaagaagggtgagttcagtctgaacaatgtgtcctgagattaccaggacaacatgttatcatttttaaagcattttccttaaccactaaattaactatttctacatgatcagccatagggggttaagagaggtttatggctgtgctaccctaaatgttggcagagccaataggaaaacagaaaccatggggctaaggcaactcattttttcctttaaactatatttttaatattctggaattccccacagggctgagaaaaagattatgaatgctgctagcaaacttgctacaatggcaaaattactggaaacacctatttctagtaagtcccaaagcaaaactacacagtcaggtatgtcaaagtgagtcgccaaatggtttttctatcttttcttctttagctatttaatattttcagtatgaagaaggcagggaaggtaaggagtgagagttaatttgtgaagttttgtatgttttacttaaactagaagtttacgcaaaaagagtacacagtttccaatttaagtaggcagactgagcatgcccatcagtttcctattgctgcttccatccctcgaaatgatagaaaagattttaaacagcaaataaagaatgagaaaaagaagaaattataagtgggttttaaaaagttgcagtgggccaggcatcatggctcacacctgtaatcccagcactttgggaggctgaggtgggaggatcccttgatcccaggaatttgaggttgcagtaagctatgattgtgccactgtactccagcctgggtgacagagtgaggccctgtctcaaaaaaaaaaaaaaaaagtttgcagtggatagaccagaagctacaagaaatccctgagagaaagaagacagtataggatggaagatggaaacctcagttcaaaaccaccgggagatgactattgcaattaggagcaatatcaaaactgttccacatatgagggtgatatgttccaggagaaatagagggcctaggggatatgaatggggtaattagttggtgttctaaaccaacagcaaccaggtggggttaatcctctctttatttcttcttctcccctcctttccccaacctcaatattgagctgggcaacaacaacaggaacaaagaatctgggagcagggcagtgctccaggtggctagccatatcaagcaggaactgggagccgacttgccttgggaggctgagatgggaggatcacttgagtccgggaggtcaaggctgcagtgagctgtgatcgcaccactgcactccagcctgggaaacagagcagaccctgtctcaaaaaaaaaaaaaaaaaaaaaaaaaaaagtaagagtaaccaacaaaaacatagaacgtataactttaaaactggtaaaggaaaaacttggaaaaaaacattttcaatctaacaaaatcaggaaagaggaaaaaaacctagagagcgtgggtaagtaggacataatagtagtttgaaacatcaacaatcacactaaatataagtaggttaaactcatataagttattaaaagaccacaactttcaaatagggtttttaaaaatgtggaaatttgctatttttacaagaagaacatctaaaattaaaaatcaggggatggagaatgatataccaagcaaatgcagtgttgatattagataaattatagaggtaaataaaagattagataaattagagttagcattaaaagggacaaagctgatagttcataatgataatggaatagtctcccaagaaactgtaattgttttctttctgtagatcatacagctttatataaagcaagagctgatagaaatacatgaaaaagactggtaaattcccaatcacactgagagatttttaacatatcagtggggaaatggggttcttgaacctctggaaaacttgaagctgagattgttcaggggtccatgagtctgatgttggtaaacattcctcatgtacaagccaaagattatttgtataaattttggaatggtgatgtgaaccttaggtatgaaaaggcagtaacatataacaagaaaataattttctagatctggggcaacagtgtgcaaataatgtccccagtagagaagcaaatccttttcatggactctagggcttgctactctgagatacaatgcctctaatttcatgctatgtggctgctttgtctttgatcagatttagtgtcttaggtaattaaatcagaaagtctatttagctattctagaagtgtatgtgtaggtattgggtgggtggggttctttgagcgaacttgtcagaaactccattcttaacatcagaatcagggcaggattgaaaacattgtggctggatcttgaaattgctataacatctattgcagaaaatgataggtcagatggatagcaataataattatatatcagatcttagtaacaaaattaccaagctttatctagtggatatatgtaaaagaatatttttaaatgtccagcattgatgtattttctttaagaattattacagtatataagcattctttgggaatacagtataaaaacataaattttttcttatttttaattttttttatttttttgttcaaggatgaatcttccctttaaatattaattttctcttaatttcgtgtttccttgcacataatagcactgcccctaacttcagagatgctgattgcagttaaaaaatcaaaaagaaatgatgtgaatcagaaaataccatgttgtattgaaagcaaatcaaatagtgtaaacaccatcaccagaactctgtgcgaacaagctcccaagaggagggcagcttgtaacttacaaaggctgttagagaactcagagcatcagagcataaagcatgtgggatccaaagagacacatttggaattccagtttggggatggtagttgcaagcacctaaacagtttgccaaggaatgtttctcctgagtttgttccttgtgaaggtgaaggaggctttggtttgcacaagaagaaagacctactcagtgataatggttctgaatcacttccgcattcagctgcatacccctttcttggaaccttaggaaataaaccctcacctagatgtacccctggtccttctgaatcaggatgcatgcatataacctttcgcgattctaatgaaagacttggtttaaaagtatataaatgcaatccactaatggaaagtgaaaatgctgcatctgagaaaagtcaaggtttggatgttcaggaacctccagtaaaagatggaggggaccttagtgactgcttgggctggccttccagcagtgcaaccttatcctttgacagtcgtgaagcatcatttgtacatggtaggccacaaggaactttggaaataccaagtgaatctgttaaatccaaacagttttcaccatccggttatctttcagatacagaggaaagtaatatgatttgtcaaacaatgaaatgtcagcgttatcaaactccatacctgtcagaagaaaccacgtatttggagccaggaaagatcagtgtgaattgtggacacccatctcgtcataaggctgatagattaaagtcagatttcaaaaaactgagcagtacattaccatcttcagtgtgtcagcagccttcaagaaaattaattgttccgctatctagccaacaagatagtggctttgatagcccatttgttaatctagactaattatggtacagtatttaagaagaatcattaatatattaacaaaaatggaagggaagacctcatactgaaaaaaattgtgagccctgcctcttttgagatgttttaataacatctgttatataagtaaagcattcttctaaaattgcttgagatatttatgttgccttaatattccaaaggcctgatggtgtatgtataatctgcttttgtgtggtgcttatttttggtttctaaaccatctatttttatacttataaattgactcactctgcagtgttaacttatttaaataaacttgcatatggtctgta

SEQ ID NO: 12 - DNA, 6211 bp, Homo sapiens
  DNA (1)..(6211): CRABP2
gattcaagtgctggctttgcgtccgcttccccatccacttactagcgcaggagaaggctatctcggtccccagagaagcctggacccacacgcgggctagatccagaggttggtggcgggggcgcagggccccccaggtgggggggggcggagcgggaggcggggccacttcaatcctgggcaggggcggttccgtacagggtataaaagctgtccgcgcgggagcccaggccagctttggggttgtccctggacttgtcttggttccagaacctgacgacccggcgacggcgacgtctcttttgactaaaagacagtgtccagtgctccagcctaggagtctacggggaccgcctcccgcgccgccaccatgcccaacttctctggcaactggaaaatcatccgatcggaaaacttcgaggaattgctcaaagtgctgggtaaggaaatgttcgagggcccaggtggggcaagggggggctctggagtcctcgaagttggggatgagaaagacagcgggaccacaatcagggcgtgagacactgggtgcctgcatccccgaaaaacgtgccaggcgtccgggtcccggggctctgggcacgacgcctaaatcccgctttctcctgcgggggcccaccggtgccaacactgcggtgactcacggcctgtgaatcacgtagaaaccagaagcgcgaggttggcctctgggggaaggggaggctggcctcagcggccggactcggcgggccgaggcacctggctctctgcagttcagaagctgcgggctggtggagccacgaaccctgcatccagactgggagcccggttccctaccctgcccagccgctcggagacattccaatctccttcccggtgcccccctcggtaacccaatccccagggcaggctcattacccctcggcgcccagctctgcctgcgaggtgatctgctgccccagcgccccctgagccccactttcctccccctctgcactttccactctgctctccccaccccccatctgtgagacaagtattttcatacagcgagcagctccagagttctaaaatcgctagggataattatcactttcttggatttcaacaaatggtttcgtgtgaaaccccaatcccacatttccaaaaatctaggttcccacctacctcccccgaccatagatcggctgcagcccaattgggtgtgttggtcaaaggtggggaaaactaagtcaatccagactgcctttcccacttttccagcccaccttctgtgtgccctctgggccaactgggctagacatctggggcaggggagagtgccaggacctggtgactgggagaggactctgggggagagatggacgttagttaaggaccccagccactgggagcgtaagggcaggcctgctgccttcaattcctgcactcaacagagagacggtagttcggctgggttgggcgagaggggagggagggaaggcacccctctccctggactataggagtgagtctggatctaagacaggtctggaatgctgcagagagagcagggatctccatcagtccttgccgttagttcttcctgcgatctaaccacaatacttcttggagtcatatcagtctttcttgctctgtccttgctaaacttaaagacaaaaagaaattttctctttggaaagcctagatgccactccctcctcatcttctctggattctggcccctgtcctcagtggatgaggtggtggtctggtacacccccaggccccagctgaagagtaagattcaaggccccaatcctgctgtctgtcttcagtctgtttgtcctccctgcagggtctctctgagccacgtgccctcctcaggccctgcagggggcagattaaaaacagatccattagacaaacacagtcctgagccagctaaggccggctaagctgggccctcagctccacaggcaccaggggctcgctgaaaggatgtctcctctgaacccagccttgcctctgcaggaacttcggtcctggcacacccctcttagctctagtcaagggtccatctcaataagacttggggacctgtcatttcttcctagacacaagagttcagcagccaacaatgggggtcctgggctccccaggggcaaggcttcctctctccctctctcttctgtttgcagtagggtaggtatgctttggcactgaggggaaagaggatttgtttctctaggaacccaggtctggaggaggtccagggagttggccagatcaggggcagggaaatcctgctacctggcagagggccctttcacccccgcctagtgcatccctggctctactccaggacagggcggcagatcaggccaggtgaggtgggtgtgtggagcttagacctggagcccatccagagaggccccctgctctgcacgtcttcctttcagaggggtgctgtctcctatctcccccacttcggttaataactggggagcagagagaaggggtccaatctgggctgggatatggaggtgcacagagagtctgaatccacgaggctgaatgagatagccggaccctgtgaggggagtggggggtcctgaagaaggggatacatcacacagagcggggagggcagtctccttttctattccttcttctcacagcagagggggttcccttgaggggacaggggtatgggagtcttccagaagggcagatgagtacggtgcctaatgcagagagctttgagccccagctttttgctttcctttttttttttttttttttttttagtggtagggtctcactgtgttgcccaatctagtctcaaacttctgggcttaagcagtcctgctgcctcggcctcccaaagtgctgggattacaggcatgagccatggcacctgaccctttgccttccttttatcagtaaaaataataccaacaatcatagctattgtttcctgaaaacttaagcatatgcctggcactgtgtgtgctaagtcctaaacacataccatcccaattggctttttttttttttttttttttgagacagagttttgctcttgttgcccaggctggagtgcaatggcacaatcttggctcaccacaacctccgtctcctggattcaagtgattctcccgcctcagcctcccgagcagctgggagtagaggcatgtgccaccatgcctggctaattttttattttaagtggagatgaggtttctccacgttggtcaggctggtctcaaactcccaacctcagatgatccacccacctcggcctcctaaagtgctgggattacaggcatgggccactgcgccaggtcgtttttgtttgtttgtttgttttttgttttttttgagatggagtctcgccttgtcgcccaggctggaatgcagtggtgtgatcttggctcactgcaacctccgcctcccggattcaagtgattctcctaccccagcctcagcgtcccaagtagctgggattacaggtgcgcgccactatgcccagctaatttttgtatttttagtagagatggggtttcactatgctggtcaggctggtcttgaactcttgacctcgtgatccgcccgcctcggcctcccaaagtgctgggattacaggcgtgagccactgcgcccagacttttgttttgttttgtttttgagacagggtctctctctgtcacccaggctggagtgcagtggtatgatctcggttcattacaacctccgcctcccgggttcaagcaattcagcaattctcctgcctcagcctcctgagtagctgggattacaggtgtgagcaactgcgtccagccctggcttttttttttttttggtagagtcggggtttcagcatgttgcccaggctggtatcgaactcctgagctcaaacaatccacctgccttggccttgtaaagtgctgggattataggtgtgagccactatacccaaccttgattggcttttgaagaagctgttatttccattttacaattgaggaatctaaggctcagggtggttaagccatttgctcagggtcacccagcctgtaagggggctgagccaggaggaaatcacagcctcctggaccttactccagagcctctgtcttcccaggctgctgaccattctgtagagggaagcagctgcccctgctctctttcattgctgtggggcagaaattgggcaaatgaagacctatctagcactagatacggtgggtagatagggcaaaaagggaaatggctcctacttcccaggacatgagtgatggggtctggcctgtgcttggccaggggtacagtcccagtgactctgatgagctgtcaacagggtagacaaaaggccaaaagtgaagtaaacagagacaaccggagccagtagcaggatgtttgttgggtagggggctggggagaagctgcccctgggcattctgggactgaagagctgagacgtggggagcctgatccagacctgctgactcaacaaggtggggccacagctaggaacaggactcccaggggcaggccactgcctctctccctctcctccctaaaccccctcatctttcagggctgcaccgcctaccgtctccttcaaggcactttcttagacacccaggcaccaggcagatgcaccccccaacacacccaccccaagcaagtcacaaatcagcctgctccaactgtcttatggggagggtgtgagagaggtgcccaaaggcccctaaaaggtgagcctctcctctctccccacaggggtgaatgtgatgctgaggaagattgctgtggctgcagcgtccaagccagcagtggagatcaaacaggagggagacactttctacatcaaaacctccaccaccgtgcgcaccacagagattaacttcaaggttggggaggagtttgaggagcagactgtggatgggaggccctgtaaggtgagtgccagaaggggctccagggtcatggcgtcattgccctgcctctcaacctgccattttccaggctagcagttaactcctagcttctctctgtcccagtagggaaaatccctaggtggtggtgggggctagaaaggggctctctcccttatccctctcactgcattgcccctgctatgggcccagctcacttggccacctgtctcttgcagagcctggtgaaatgggagagtgagaataaaatggtctgtgagcagaagctcctgaagggagagggccccaagacctcgtggaccagagaactgaccaacgatggggaactgatcctggtaagtcctgcctcctccccactaatagcaaacccagtgctaccttccaagattctctgggagaccccagggtgcaggagactcaagaacaaccatggctggactccgcaccctgctgatgggactgcttgaacagaactaaggtgtccctatcccatacagtgccctgtgtgaattagaaatggtgttccttttatgcaagcaaagggcatgtactgagggatcccagcagttcttcagggagatcttcctggcttgaggaggaggacgggccccaggggctctattgctatcctccctccattgatgcctgggcattctgggaccagctcctgcctgttggtcttgagccaagaagcaggtttggacctggaggccaagcagagtacctccattcaaccctcctctccaaagccacaggaccccaggggcctctcaggctaacaactacttctgtccttccagaccatgacggcggatgacgttgtgtgcaccagggtctacgtccgagagtgagtggccacaggtagaaccgcggccgaagcccaccactggccatgctcaccgccctgcttcactgccccctccgtcccaccccctccttctaggatagcgctccccttaccccagtcacttctgggggtcactgggatgcctcttgcagggtcttgctttctttgacctcttctctcctcccctacaccaacaaagaggaatggctgcaagagcccagatcacccattccgggttcactccccgcctccccaagtcagcagtcctagccccaaaccagcccagagcagggtctctctaaaggggacttgagggcctgagcaggaaagactggccctctagcttctaccctttgtccctgtagcctatacagtttagaatatttatttgttaattttattaaaatgctttaaaaaaataaaa

SEQ ID NO: 13 - DNA, 5157 bp, Homo sapiens
  DNA (1)..(5157): DNASE1
acgtgcagggctgtccttggagggccagcacagccccttccaagtgggcaagacccaggggtggctcaaaagatagctgtgccctagccctggaacctctgaatgttgatttttgtagcaaaaaaggacttgcagatgtgagtaaaggctgttgagataaggacatcctccctgctctctgggaggaccccaaatgcaggtgcacagatcttaagaagaagaggcagagactggggtgatgcagccacaactaaggaaagccaaggattgctggcagcctgcagaaactggagggcaaggagcatcccccaaccgcccggagcctccaggaggcgcaaggtcctactgactccctgacttcagacgtccagtctccggaattttgagaggatccatttctgttattttaagcaaccaaacttgtggtagtttcaccagtctcaggaaatgaatacgaatggaaagtcaaagattccaagaaatgagtggcggggtgcggtggctcacacttgtaatcccagcatttgcgggaagattgcttgggctcaggacttggagaccttgtgtctgtgagaaacttaaaaaataggctgggtgcgatggctcacgcctgtaatcccagcactttgggaggccgaggcaggcggatcacaaggtcacgagtttgagaccagtgtgaccaacatggtgaaaccctgtctctactaaaaatacaaaaattagccgggtgtggtggtgcgtgcctgtaatcccagctactcgggaggctgaggcagaagaattgcttgaacccaggaagcagaggttgcagtgagccgagatagtattactgcactccaggctgggcagcagagcaagattccgcctcaaaaaaaaaaaaaaaaaaaaaaaaaaaaaaaaaaactgagcatggtagcatgcacctgtggtcctggctacgccggaggattgcctgaagccaggagttcaagaccagtctggacaaaagagcaagaccccatctctaccaaaaaaatttaaaaattagccaggcatggtgccgtacccatagtcttagctactcaggaggctgaggagggaggattatctgagccctggcggttgaggctataatgagccatgattgtgccactgcactccagccttggcaacacagtgtgagaccctgtctcaaaaacaataaaaacccaaaacaaaagaaccaagaaattactggacctgaggcctggcctttagctgctgccctgcccttgtgacctggtcactcgggatcccctgggcctaaacacacagcctattgtctacctcaagaaggctccccactgcttggctggcaattggggtgggctttgcaggccccacctgtcctggccccacggcgctggtgctgcaggcccccaccactgcttgttccgagctccccagcctcctgcagagttgcctgcacctgatggcgatgaatcaggaaggcaggcgtgtcctgggccacagagcagtcatggctgtcagccaccagggggctccatttgcaactttggatgtggctttggcctctttgtccaaagtgaccttggggcccccagacaagagacagggagactggagcccagccccaccctcccgcacatacctggcccatccctgccctatcctggaagatgggggccaccacacgtgcaagggacacgggataggaacctttggccttgttatcagacattttaaaactaagtgcaaacgtgattatcaggtgcagtttttacagcagcaagaaacctgtgcttacagaaagaaacacgtgctagcaacccacctatgcggaaagccacacagagccattgttttctgcactctcaggtgacggctcacatttgccccagggaaggtcacagctgcctgaacttttaaaactcccagacacgcactgcctgtgcaggatccggagcccagcagcactgccagggccttgaagtgcttcttcagagacctttcttcatagactacttttttttctttaagcagcaaaaggagaaaattgtcatcaaaggatattccagattcttgacagcattctcgtcatctctgaggacatcaccatcatctcaggtgagcaccaggtggagtgcctctgggtgactggccggtttggagcagggagggaggcttagagtctcatcctccagcagcgagtgaggcggaggctccagcgtccctcccgggcgggttttctggtggatggaggagtgactcggggtcctctacgtggtgccagctgtttggctttctggacgttgtaggaaagggtttcccccgcctgcgtccccctgaccttgagctccaccagcccctgccagctgggctccagaaggctggagtgctgtggcagggatgacgtctcacttctgttatgtctctgtgccctgtgctctcccaggatgaggggcatgaagctgctgggggcgctgctggcactggcggccctactgcagggggccgtgtccctgaagatcgcagccttcaacatccagacatttggggagaccaagatgtccaatgccaccctcgtcagctacattgtgcaggtgaggccagggcagcctccccccaaaagcagaggagctctggagtctagggctggtgggcagggccagccctatggagccacagggtgtcgggtgtggggtactgagcaccactgctcccagcacggtggaacaggctcttggctgtggaccaaggtcctcatccctgctgtgctgtccctggctggcagcaggagcccaggcagaaacatgaggctgcggttaaaccgagcaatgccacgagcatcagctgtggctccctttgtggcgctgtagggtccctgggtggcaccagccctgctcagcaccactgtggccctgcccccagatcctgagccgctatgacatcgccctggtccaggaggtcagagacagccacctgactgccgtggggaagctgctggacaacctcaatcagtgggtgacagtggcagggtcataggaaggtgacatctcgtccacggcacagcctcacttcacttgggccccaagggtggggacctgggcacagcctcgctatcggcagccagaggggtcccctatggcccccgccactgggaccttttgtttcttcaatccagggatgcaccagacacctatcactacgtggtcagtgagccactgggacggaacagctataaggagcgctacctgttcgtgtacaggtgggtggtctagaaagccaggaagcccctccctcacctgggagggccccaacagagcagggaagtagtttgtcctattagtttgtcctatggcaagaacctgaggcttcagagcagggtccagggtggagtgaaaacaccccaaggtcccggaccaatgggttgagcaggtgcctggctcccccgccctcctgtcgcctgggtcccggaccaatgggttgagcaggtgcctggctcccccgccctcctgtcgcctgggtcccggaccaatgggttgagcaggtgcctggctcccccgccctcctgtcgcctgggtcccggaccaatgggttgagcaggtgcctggctcccccgccctcctgtcgcctgggacgcgacgcctgcctcctgggaagcaggagtggggcagcttccagcctggggtcacctcctcctgcccggccttcccgcaggcctgaccaggtgtctgcggtggacagctactactacgatgatggctgcgagccctgcgggaacgacaccttcaaccgagagccagccattgtcaggttcttctcccggttcacaggtgggtgctgcctgggccagggtggggctcggcttggcgcttatggcctccaccccctcctagggaacctggaatgcctgtgtcacacactgccctcccagtccctggggcttgggttttccattcaagtcatttggaaaatatccaccccccggggggactgtcatgatacatagttccagctgacatggtgactgaacctgcccccagggagtgtgcctcacacgacgtggctgtctccacagaggtcagggagtttgccattgttcccctgcatgcggccccgggggacgcagtagccgagatcgacgctctctatgacgtctacctggatgtccaagagaaatggggcttggaggtgaggccctcccaggggcagtgggcaccagcggcctccgcatgtcccagggccacaggcagcgtttcctggtaggacgtcatgttgatgggcgacttcaatgcgggctgcagctatgtgagaccctcccagtggtcatccatccgcctgtggacaagccccaccttccagtggctgatccccgacagcgctgacaccacagctacacccacgcactgtgcctatgacaggtgagcagggcctcgcgcttagggcagactgagggcacctccaagggcagccgtgactcataggtcgggcttcagaagcctcaaagcctttgaacactcacccaactgagcttcagttgatccactacagggaacagaataacaagagccacgatttttaggttttttcggaaaagcacatctggggataagaggagaggcagacacctaggctgtcatgtggtttccacattgaggggcacagaccagggtgtgcagttttgggcacccacagacctgcactggcaggtcccagggctcttagtttagttcctgcgggtgctgagccaggcccatgtgtgaaaggggaacctactttctcttcccaacacccatcaggatcgtggttgcagggatgctgctccgaggcgccgttgttcccgactcggctcttccctttaacttccaggctgcctatggcctgagtgaccaactggtatgtgtcctcccttgcacagccacatgaggatgggacacaggagctcaggtaggctcagcccagaccctgtgcccacttgcctgcaggcccaagccatcagtgaccactatccagtggaggtgatgctgaagtgagcagcccctccccacaccagttgaactgcaggaagagaggacccatcctgccacaggacccagaaaaaaagcccaacacacactcgggttaagaaatacctttaaatttaggtaaataaagctcaaggaggtggggctgtca

SEQ ID NO: 14 - DNA, 9355 bp, Homo sapiens
  DNA (1)..(9355): KRT20
gagacacactctgccccaaccatcctgaagctacaggtgctccctcctggaatctccaatggatttcagtcgcagaagcttccacagaagcctgagctcctccttgcaggcccctgtagtcagtacagtgggcatgcagcgcctcgggacgacacccagcgtttatgggggtgctggaggccggggcatccgcatctccaactccagacacacggtgaactatgggagcgatctcacaggcggcggggacctgtttgttggcaatgagaaaatggccatgcagaacctaaatgaccgtctagcgagctacctagaaaaggtgcggaccctggagcagtccaactccaaacttgaagtgcaaatcaagcagtggtacgaaaccaacgccccgagggctggtcgcgactacagtgcatattacagacaaattgaagagctgcgaagtcaggtgagagatgatgcttgtgtttcctactctgtgtttagcttcaagataaatcaagaggttatctatgttaggtaggtccaaatggactttgtaaagcaaattaggctaaaatgttacatctataaaaattctttcatctacctttagtgctggagtacctgactgtacaacaggatgaccttaaatcatgctatttttaatgtttaacacaattacatacaaaatatgaacattttatcctccggaataaaatgaatctttgtcacagcttatcacatcagggctaaatgtatagtgaacaatctttctgaaaagagctaaaaattaattacgtgataaatctctcttagtttttcacctagtccttatcaagttttgaaaccccagtaaattcaaagacttttctccttttatttaagtaaatgttataatatgactattagaatactgtactgcagatttaaatagcaaagtgattctgggtggaaacagtgtggcaggaatatgggtcttaatgatgcctggatttttaagtgccctgtttaataacatgaccatcagcatcaagcagttcagaaactacttctacagtaataaaatgttctattgcccccaattcatgtttattacaatcatatcacaacctcctcctatgtcatcaaaaaaagggtggagctctgtattttatcagtttcatggaataaaagcagaagactttgctcctaattgaaaatttcagatatgacacagagcacttgcttcaaattaaagttcttatctaattaagaaaagtgttcactgtaatttgtgttaagattcatactcctttagagcaaagcgcatttacttaccagcaagtctgtttttcttgagttgtactaaacatcagggcaatttgattcggactccatgggaagttactttggaattttagaaactatgggcatgtgaagcaatggcatttaaatagcccttccggaataaagttcatccttcgcaagctctcactaaaaatgttcgaaccacacctgtctcgtgtttctgactctagtttggttcatctgaaatacacaggcacaggccatccgtcccattgagctggacagtcccaaccataggaagcagccctctccaaaactgggtccattgaaagagaaatgtcattgtaacatcttctgcaagtagatttttcatctatatgcctccatcatgcatttcgttctttcatgcatcatgttctttcattcagccaatactgaatgaacactaactaggtgctgggcaccatgctggggactgaggaatattatggtggacacaatatgatttatgaggatacagggatggacagagggaccagcacacagagggataatgagagcacaggcagatcatccagttcagttttgagagcatctgtgaaggctcctatgaagcaatgttgtcgaacctgagacatgagggaggaatgggagttcaccagaccacaggggctaaaagaaatgtcctaagtagaaacatcaaaggcaaggcactcaataaggtgtgatgactcaagttgagttaaattatccttctgtaaaatcacaagaaagtagaccaaaccctggggcatctagagttgcattttatgactctgttatgttaaataactatgtcattattttttctatatattttcatgtagaaatacttgaaatgaacatcatttttgacataatagtcactgtagctggggataaactaaatccttgtaaactcctatccagttgaaaatgtcattcttggccgggcacggtggctcacgcctgtaatcccagcactttgggaggccgaggcaggcagatcacctgaggtcagaacttcaagaccagcctggccaacatggcaaaatgctgtctctactaaaaatgcaaaaattagccgggcatggtggcggatgcctgtaaccccagctactcgggaggctgaggcaggataattgcttgaacctgggaggcagaggttacagtgagccgagatcgtaccattgcactccagtctgggcaacagagcaagattctgtctcaataaataaataaataaataaataaataaataaataaaaaagaaaatgtcattctttctcatgtattttccagattaaggatgctcaactgcaaaatgctcggtgtgtcctgcaaattgataatgctaaactggctgctgaggacttcagactgaagtaggttccctaatacgtggcaaaagtttctgaaaaagaattcctttagtagtccttccagatactcagctttccatatcattgttgataaaggaagcacggttcaatgtccagaatcctgaagcctaaaggaggttagaagctacatgtatgaagctaacccagcactcagggatggccttctctttcttgatcccccggcatgtaactaaacacctccagtaactactattctccttggttattactggttgctaaatttttttttagtaacctggtatctaaacctaattctgccctttggagtaataacaaagtaatttacaattctccttctccctaagtgcctttctgttatctaaagagagtcttgtgtctacccttggtgattctccaagtaattctccacgttcattcaagtgcctgcaagtgtatgacccaagttccaggggtgactcttgatgatttctggcttgccagtgttttacaggatggtctggccaaccaaagaaccaggaccaatctataataattagctgggcgtgatgccgtatgtctgtaatcccagctactccggaggctgaggcaggagaatcgcttgaacctgggaggcggaggtttcagtgagctgagatcgtgccattgcactgcaacctgggcaacagactgagaccttgtctcaaaaaaaaaaaggaagaaagaaagaaaagaaaaagaaagtaaaaattgtgttcactttctttgtagtcatcacaccacatgtgaccagacctgttccttgcaaacagcttccacactaaggcctcttcatcctgaatttgtacaatgcattaacaccaaaaagccctttgtggttagaagggtagccttttaatgctccaagggattaacaagaaggaaataggaaatcaaatccaaagatgaaagcagtaaaggtgcattacttccaattttacctagcactgagtgtcacattgcagtgtcattttttaaagttggatattttaggaaactgggcagggcatgcatgatggctaacgcctgtaatcccagcactttgagaggctgaggcaggaggctcacttgagtcctggagtttgagaacagcttgggcaacgtggcaaaaccacatctctatacaaaaatacaaaaaaaattagctgggcatggtggcatacatctgctgtcccagctacttgggaggctgaggtgagaggattgcttgagccccaaaggttgaggctgcagtgagccatgatcacaccattgtactccagcctgagtgacagagtgggaccctgtctcaaatacacacacacacacacacacacacacacacacacagtgtgtatgtaagattgtagaggaggatgtagagctgtttgagataattcactttggatgtctctgttcacaaagtaataaaaataaatcgatcatgtacattcattaagtaaaactaaccattatttaatatcaataataagaaccctttgccaacacaataattaacacaatttaatttcttataagataaattctagaatttagaagtgttcaaaattatttcagattgcctttttaccagtcaccccaaattatagagattatattattgagcacattttctgactcctaggttcttatgtaaatttcatgattgtgtaaaggcagacattataaagtattgaaattgatctcctcataagccacatttaaaaacctatcccattatattagattctctccttataatggcttcagaaggaccagttatctctgtacactaattaattcacaggtatgagactgagagaggaatacgtctaacagtggaagctgatctccaaggcctgaataaggtctttgatgacctaaccctacataaaacagatttggagattcaaattgaagaactgaataaagacctagctctcctcaaaaaggagcatcaggaggtgagaaaatattcagaagtggtattggaaacaatggaatggttctatataatactaataataggaggagcgggagaaacaggagaagggggaagagttggtggtgatagtgacagagatgatgacgatgacaataatgatacaagccctaccttcttttcataatgttgttgtaagttaaatgacttagagcagcacctggaccacaataagcccaacacaagttattattttatatcttttttacttattcccaatgaaagaggtcatgagactccttatgtcttttctgcccagccttatctgagaatgtgcttcagactaaaatcaatcagaaatttcactttcataggaagtcgatggcctacacaagcatctgggcaacactgtcaatgtggaggttgatgctgctccaggcctgaaccttggcgtcatcatgaatgaaatgaggcagaagtatgaagtcatggcccagaagaaccttcaagaggccaaagaacagtttgagagacaggtaaccacacaattctaaagggtgagcaaacgtgtagatgctttcctccagaaacagataactcattttctttttcatttgttcattcttcctttctctttctgtcttttctttcttatttccacccctcaactatttttttttcactcttggcactgtagactgcagttctgcagcaacaggtcacagtgaatactgaagaattaaaaggaactgaggttcaactaacggagctgagacgcacctcccagagccttgagatagaactccagtcccatctcagcatggtaaagcatatctaacttctctttctcaatctagtatgtgtttaccaaggtcctctgttaggaactatagaaatgcaaagacctacaagaaataacccttccccttgcagaactggcagggaaacaggccgaacaactgattataattaaaggacagagagaaatcgaggaaagggcaatgtactgcatgaatgcagaggaaagagtaaatctggaagatttcacagggaaagtggcatttaaaccagatcttcttgtaacttttaagttcaggagtacatgtgcagatttatgatgtagttaaacttgtgtcatggggatttgttgtacaggttatttcatcactcaggtattaaacctaatacccattggttatttttcctgatcctctccctcctcctaccctccaccctctgttaggcccccatgtctgctattcccctgtatgtgtccattataccagatctcaaaatctaagataaaattttaagatggagaatggactagagacattccaggccaagcaaatcagcaagcccatgacaaattatgttgtggtaagcagaatccctcaaaccacagtggcctgcagccatgatactacatccaccgtgacatttcctttccaagggcaaggctaaaggggtaggccctacctaggacatgccagtgtcctggcagaaagaaaagagcaatggttggtccacttgatagctcttaaagcttctccttagaaaaggcatttgtcctttgggaggccaaggcaggaggatcatttgaggtcaggaggttgagaccagctggccaatatggtgaaaccccatctctactaaagatacaaaaataagctgggcatggtggtgtgtgcctgtaatcccagctacttgggaggttgaggcaggagaatcgcttgaacccaggaggcagaggttgcagtgagctgcgatcacattactgcactccagcctgggcgacagagcaagactccgtcccaaaaaaaaaaagaaaaagaaaaggcatttgtcagtttgacctgcattttattaaccaaagagagtcacatgacccagccaggtgtcaatggattaaaggaatctaatcctgcaattgagaaatgccacagatcacatggccaggtctgatgaaggagtgagaggtataacatcttcacacagtggggaagcaagtactgagaacaatgctacaatgcgccgcactgaaagaacagtaggtgcaaagctacaagcaaagaaaaaccccaagagctaatgatcctagctggctggctgaggttgcctagttgggaagagtgggagatggagctagaaatatacaccatgcccacagtgatgaactgcagagacccttctcaaaggaaattaaaattaacccatctcttgaatcaagtcctcacataagaagtgccctatttttcttgtgctcatagaaagagtctttggagcacactctagaggagaccaaggcccgttacagcagccagttagccaacctccagtcgctgttgagctctctggaggcccaactgatgcagattcggagtaacatggaacgccagaacaacgaataccatatccttcttgacataaagactcgacttgaacaggaaattgctacttaccgccgccttctggaaggagaagacgtaaagtaaggctcttagaatcaaggaataggtgtcaatatctgtatgcacttctattttaatgtccctgtcactcattacccagcaccaatgcaatccctaggacagaagcaattatactcacacatgcctcaccacgaacaacaaaacgaaaatataccaaaaaatacacacacgcccaaaatatcaagtacagccttgagatcatgtggtaggactgagttctaccacatgatcatttggagataattctccaaatgatatagattatgctgatattaattttcatcattaatatataattgaaggcataataaccttttggaaattctaattgagagctcatgaattagacaataagctgctgaggtccacgggagccagtctgagaatcataagtgtggcagcagcaactgtcttcagataccatacctaagaatatcaacaagagaacacaagatttaaacttccattgtaattttgttattttaattagaggaacttcttagcatatattaaactggtcagttttaaatctatgtatttttcaagttaaaaagtaaaatgctcaagtttgcaataaaagcaatgtaaaagggaaagatatatgaaagcaataacacattcacttggactttgaaatataaaagacaggagtgcattccattttcaaaacagcaataatgcttttttctgtttcttttttcttcttttcattaaaaaaaaaaacagaactacagaatatcagttaagcaccctggaagagagaggtaagttctaaatttttgcacattttctatgacattcagctgctttctattaactacatgccactgataaaaagtaaagtgaggctgttttagtctgttttctgctgctgtgacagaatacctgagactggataatttacaaacaatagacgtttacttggctcacagttctggaggccagaaagtccaatatcaaggtgccggcatcttgtaagggccttcttgctgtgtcatcccatggcagaaagtagaagtgcaaaagagtgtccatgagaaccagagagcaagaggaggctaatctttcttttagaactagcccactctcacaataactaacccattatcatggtaaccacattaatccatccatgagagaagagccctcatcatctaatcaccttttactaggccgcacctcccaacactgttacattggggattaagttttccacacatgaactccagggaacacattcaaaccatagcaaaggccaattctcaagggagcagatatgacaccagggattctaaaaatcttgtacatggcataaagaaaccctccacatgggaacttgggcacactcctcagaatggggtgattttcttggcctgtgctattgctatcttgaaacatcctgacatcctgaaaaggaaaaacaagacaaaatttgaattccacttaaattcaagataatttatttcttgaatttttaagagtaggacatttgtaaatttggggagaagcacattttctgcatctatttataaaatggacttaagattttttgagaaagaggatgggtttaacatatttttctaaaagaaggaaataagtaaaaagaataataatttaaagttgaatattataaatcagcagagtcatgtgcctgaattaacatttaatgtttaatatgaattcagatataaagaaaaccaggaagattaagacagtcgtgcaagaagtagtggatggcaaggtcgtgtcatctgaagtcaaagaggtggaagaaaatatctaaatagctaccagaaggagatgctgctgaggttttgaaagaaatttggctataatcttatctttgctccctgcaagaaatcagccataagaaagcactattaatactctgcagtgattagaaggggtggggtggcgggaatcctatttatcagactctgtaattgaatataaatgttttactcagaggagctgcaaattgcctgcaaaaatgaaatccagtgagcactagaatatttaaaacatcattactgccatctttatcatgaagcacatcaattacaagctgtagaccacctaatatcaatttgtaggtaatgttcctgaaaattgcaatacatttcaattatactaaacctcacaaagtagaggaatccatgtaaattgcaaataaaccactttctaattttttcctgtttctgaattgtaaaaccccctttgggagtccctggtttcttattgagccaatttctggg

SEQ ID NO: 15 - DNA, 10058 bp, Homo sapiens
  DNA (1)..(10058): PLEKHF1
agctggccgggacccgggcggagcgggcggggacccgggctactgcggtgtggactcgagggctgggcgcggggccggcgcagaaggtgagtccccccaccgtcccccggccgggctgcgggtcgcggggcaggcgcatgaggcgagtctcccatcaccacccccggacaagcgagctctctcccgccgcgcggtcttggcggctcctgggccggcggggcgcagtgccgctgactccagcccaagaagaggcctgggaagggcgctcctgggcggcttgcggggtgaacctgcagggagcctggggagagcggtcaggggtcagagcgtccgaggcggaatccccggggaaacgcgcagatgtaagctggtggaggtaagggggtcgcgggccacccgggactgcaggggtctcagcgcacccggtcgctggtggtgtttccgggatcctggcctcgtgtggccgccgggacctctcttctcagccccagtctgcagtctggaggcctggatgggaccactgtccccctgggcaggggcgcggcggggggcgctggggtcccagttcctctggagcagttgagtttgtgattcttggtgggagctgccaagggaaacagggtcgggcactgctcccatctcagagaggaaactattgagcaggcccgcagagagaggcggcctggaatctccctcctttctcgtttccccaacacctggcgggccgtgtagggcagaggtgtggtcagcctctttgcaggtgggaaagcagagaggttccgagccacgctgaaacttgatctctgcagcccaaggggagcactcctttggaatttgaacacctctggtatctcctggccagagagggtcagaggccaaggaggtggggaggtagtcccctaatgcgctgggatcgtccctctgcacagcgtcgttcccactggagtctgttgtgagctgagatgactctctgacttcggcctgcgtccctgcacacgtcagccctccgggctgccaaaacacaggccaggcagccctgggtgaactaggggacctgcccaacccagcccaccccgaggaaggaagggggattggccagtgtggcctggagggtgggacagcccagccaagctgacggacctgctcgggatggggtgggcatcaggcatttggagcgcaggcaacacccgctggactctgacttctggagttctgatttggtctctggttgagtgcagctttccacagctcatggttattttggagccgagcttcctgatcactcagcagggaccttgggcagtgactttgatgtggtggaagtaccttccccaagggggcttttgtgaggattaagtgaaataatgaacgtaatatgcttaactttgtgcctggtgagctctaagtgctcagtcggcggcacttccagttttgttttgctttgtttttcattaccggtctcttcccggaggagggccttccaggaatcacagggctggacagagcccaggggcggcccctctggagggagaggaggcttggcgcctgatgctgcagtctcaatgcacatggagaaaacctcacatcctcacgctggcctgggagcctgcaggatgtctcctgccggcactgcaacctcatctgtcctccttgccccatcgctccttcctccgcagcctgacttcacccattccaccttgagctgctccccaggaccggagctctgcccctagatctttgcacagctgacttcaggctggagtgagttcacttcctcccaaggccttccttcctcgacctccaccgtcctcccaggccctgccctgctgggcgcaccagtctttttcttcacagtgtttagcactggctctcagaaaagaccctgtgaatgtacttctagtctcactggcaagaagtgtgcattcctgaagggcctggtctccagctcccggctgtaacctcgcacagtgtctggcacacagtgggactcataaatatttggaaaatgaaatcaggcaggcatggaagcagggtgggtctgcgtgcggcccaggtccctgcagggaaggaggagccccgatctggaagtcaagggaaagtccaaagggctgagctgcccccagaactctgattcccttggtgaccctggccctgcacgtccctgagcaggttctccacctgtaacccgaggcagagcagttacagcccccaccccatcccccaccgctgcccagctcctactttccagggctaccatcttggggccccacgcatctctcatttatccaaaatgctgtgtccggagtaggagagaggacaggacgactcccgtcaggacagtaccttgtgtggcctgttcagcgtgccctgcagtgtgtgcattatacattttacaatgtggcatggtgtagatcaggggttggctaaccttttctctcaagagctggtagcaaatagtttaggttttgccagccatacagcctctgtcccacatggctgtgtttgaataaaactggatttagaaaagctggcagtggcccagatttggtgtagctctccagcccctgctgttgatcacgtatcacacctgggctgccacatacagaacctggcttcatggcttctgcagccacacgggggctctcaggatgtggctcccaagccgcagtgctcacatgagcacctccagcccctgtgcaggcagcaggattgctgagcctgagagcccccacccctctgaaccctcaaagaaagatgcaggtctgttcgttgcctggtctcccaggcttactgagcctgcgctggggtcacccctctaccagcagccctggggccacactggggccaatacaggcactcagggcccagaggctgccaggaagctctgtcaccaacatcttcccgaggcaggccggccccaaatgagtaaggacagggctcagcttttttctcccctgtgctaagcaagggaggttcacttccctagtgagaacaattaaaaaaaaaaaaaggattcccagctgggctcagtggctcatacctgctatcccagcactttgggaggctgaggagggaggattgcttgaggccaggagttcaagacctatctaagcaacagagtgaaccctcgcctctaaaacaaatttaaaaattagccaggcatgttggtgcatgcctgtggtcccagctactcaggaggctgaggcgggaggctttcttgagccctggagttcgaggctgcagttagccctgattgtgccactgtacttcagcctgggcaacaaagcaagacaatgtctcagaaaaaaaaaaaaaagaaagaaagaaaaaagcattccccatctaactcagggctgctgtatttgccaagaaaaacctacaggcaaggtcaaaccaggatgtgaagttgtggtcatgtagagaaggtgagcatgccggggcagctcccaggaggatgttgtctgccccgcccctcgcccaacctgggaccctctgcaggttcacaaaggagggcacatgtgagcccctggcttccccagtcagtgtgtggggtcagctctcagcccagcccctttcatcgccaccagatgcccctcctcgcccttcctggtccacattttaccatcagcagctggacactagccctaagagcctagagggggtctgtgagtcatgggtgggggcagagcagcaaaggggtcccatgtggagtgttctgcaccccctccaagggctgcagagacagcgtcatggactctgccctctgctggacgggtccagggtggattgggcacccctgcctgcagctctcttctgcctggtgctgctccttcccttcctccatgccatccacttggctggcccagtctccagagctcaacaagcccccagggttgcgggagggctacctgctctctgggcacaaagcccacctgcctcagctactgaatgtggaggctttggtctgcagtctcaggtttgggttttcatcccgtttcaccagtggcctgacttctcagcacacagctgggctgggggcacacgtggccttgcttcttcggggctcctgacatcccctgcaggtgcccaggcctggatgccatgtggtcaccctatcaggcccagccaggcgtcccatcatgagacatgctcagcggcccccagcccatggagcccaggacccaatccagacactggcctgtaattcttttccttttgaagaccttaaattagaagaagcaacacgtgttcccatttcttgaaattggcagatattcggatttcatcgtgtttgctgctgcctttttttaaaaaaacttttttaaaaatgaaaccttatagacgaaagtggaatccaatctgagccctccattcctggtcacatctatgtcctctccccaggctacttactcctgactttctccttcctatcttttatttttaccattctaaccactttcaagtgtacagttcagtagtgttaagtatattcccattgttgtgcaacagatctccaaaactttttttttctgagacggaactcactgtgatgcccaggctggagtgcagtggtgtgatcttggctcactgcaatctctacttcctaggttcaagtgattctcctgcctcagcctcctcagtagcagggattgtaggtacataccaccatccctggctaatttttgtatttttagtagagacagggtttcaccatattggccaggctggtctcgaactcctgacctcaagtgatctgcccgccttggcctcccaaaatgctgggattacaggcatgagccaccacacctggcctctaaaactttttaatcgtttaaaactgaaactccatacccagacaacctccgcattccccttctggcagcccctggcaaccaccattctattttctgtctctatgaatttgatcagtatgtatatctcatataagttattacagtatttgtccttttgtgatgggcctgctttacttagcatgatgtcctcagggctcattcgtgttgtagtgtgcgtcagaattaccttccttttcgaggctgaatagtattccatggtatgtatgttccacattttgttcatccattctcccattgacagacgtttgagttgcttccacctcttggctattgtgaatgatgctgatatgaacatgggaaagcagatatttattttagtccctgctttcagtctggatatatatccagaagtggcattgctggatcatatggtagttctgtttttaacctttttttttttttgagacggagtctcactctgtcgcccaggctggagcacagtggcgcgatctcggctcactgcaagctccgcctgctgggttcacgccattctcctgcctcagcctcccgagtagctgggactacaggcgctcgccaccacaccaggctaattttttgtattttaagagacagagtttcaccgtgttggccaggatggtctagatctcctgacctcatgatcccccctcctcggcctcccaaagtgctgggattacaggcgtgagtatttttaactttttaaggaacttccatgctgttttccttaggggctgcaccagttcctattctcatcagcagtgcacagtttccagtttctccacaccctcaccaacacttgttatttattttttgttttgtttttttcccctcctttttttttttttgagatggaatctcactctgtcacacaggctggagtgcaatggcgccatcttggctcactgcaacctctgcttcctgggttcaagcgattctcctgcctccgcctcccgagtagctggaattacaggtgtgaggcactgtgtccggccttcctcctacctatttttattcatagatatagttcttgaacactttcagaatgttatgtaattcctgcataagtggtgtcactttacatacaacattctacaggctgtgtttttccactccacgtttgttgtttgccgtcagaccacattgatctgtatctctcattgcgtgagtagccccgggtttttatccttttccctgctggtaggcattttggttgtctctgctgggcagtcattgctctttgtggaatgcagttctggttttgtcagattgtccctcagccaggtactcggtgatcagtcatggtgggacaggtcagttctgtcactggtaatcccctaggtttgcagtatacagccaagatcagcaagctaaaaatagcagttcttacgtaaggtagtgtgggcagcccttctcaggacacttgtgatctgcaggggcaagtggaacgggactcgagggcccagcatcttctgttctgcaatgcatccaccctcacactggggccccactctggctttctactggtggccaggctcagaactgcagctcagtgacccagaaacactatgggtgtgatcagctcagccccaggcgtgccgtgtgtaccggaatgcatgtgtgcacgtggtggtggtggggccagctctcacctcttcctctgtagaggtaagagctgagtcatgcatggtgggccttgggacctgcttggaaccgtgccaagctacttatgaagcatctagtatgtgcttggcatggctccaagaattgtggacacaatgaacaagaagaagctcctgttctcatggagctaagaactgagcagggaagcagaaaacacacaagcaatgaatagacaagcaaacagcaggtcctgttaaatcccacaaagaaaaacgattgaatcccagagaagtggccagcagaccttttctacaaagggccaggtggtgaatattttaggctttgtcaccatgtagtccctgtcaccaacactcaactctcccattgcagtgtggaagccaccagagacaataataaatgaacgaatgtggctgtgtcccaataaatctttaacaaaagcaggctgagggccggatttgactctcagaccttggattaccaatgcttgtcctgggtgtgggaagaggctgcctgagctggggttgtcagggagaaccctttcaaaaaggaactgagaacccgttgcaggaaggagctgaccctgggacagcctgtctcaggtaggacacaatggcaccttgccaccgatatggtggcggagttatgtgctgagaaatgggcaggctagatttgagaggtaaagatgatgagatttactcatggcttgaatattggaggtacaggaagggggagattcaaggatgtgtcctaggtctggggtttgaactcctggatgaatggtggtgtcactgaaggagaggaagaggtgcaggtctgcggaggtttgttgttggatgtgttgagtttgaggagcttattagacaagcaggtgaacatctatgctgacagccctcctagagcttggagaggccaagactggaggcttggaatggggaatctatggcatttatggggtcttcaaggtcgtgagtctggtgggctggtgtgtgtgtggaccaagcagggggcgcccggcatgagctctgagttagtgcttagtgcttagggcaccaacagaggggcctgtgtggcctcacactccactcgggacggcagcatagtgcgagctccagggcccctgcctcctagcatcgcctcagttcccctcctgtaaagtggggattctgccttctggggttgggtgggaactaaatgagatagtcacgcttggctgacaggaagcactcggcgcctgtgcttgtgatggtggtggtgactgctgcacttcctgggtggttgcgtgggttgcagggcctgtgacagcttggtttggtggatggcagagtcagggttgggttgggggtagagacacccaggtctcctggcacagaccgttctgatgtcccgttgaggcctgttccgccctgtttttcaaggctccccagcggggctgaacctctgccctctgctgcccacagtagtagccggctcagtagcactttttttttttaagagatagaatccactcagtcacctagctagagtgtagtggcatgatcatagctcactgtagcctcaaactcctgggctcgagcctcctcttgcctcagccttccaaaacgctggaaccacaggcatgaaccgctgcacctggcctaagtagcacactttatcactgccttcccatccctgtctggcctccacatcccctttactgggaaatcccccttccctccccgtagttccctgtactcccgtctaagggtcagcttccgaggtgatgcttctcagtgctgggcaggcctgcgggttactgtgcgtagtcagtgggctgcctggcatggtgggttagtcagttgggggtgggcagcgtggttctgacacccccatgcctgagcctggacatactccttgtctgtctcctcctgcagccgccagctggagacgatggtggaccacttggccaacacggagatcaacagccagcgcatcgcggcagtggagagctgcttcggggcctcggggcagccgctggcgctgccaggccgagtgctgctgggcgagggcgtgctgaccaaagagtgccgcaagaaggccaagccgcgcatcttcttcctctttaacgacatcctggtgtatggcagcatcgtgctcaacaagcgcaagtaccgcagccagcacatcatccccctggaggaggtcacactggagctgttgccggagacgctgcaggccaagaaccgctggatgatcaagacggccaagaagtcctttgtggtgtcggccgcctccgctacggagcgccaggaatggattagccacatcgaggagtgcgtgcggcggcaactgagggccacgggccgcccgcccagcacggagcacgcggcaccctggatccccgacaaggccacggacatctgcatgcgctgcacgcagacgcgcttctctgccctcacgaggcgccaccactgccgcaagtgcggcttcgtggtctgcgctgagtgctcgcgccagcgcttcctgctcccgcgcctgtcccccaagcccgtgcgcgtctgcagcctctgctaccgcgaactggccgcccagcagcggcaggaggaggcggaggagcagggcgcggggtccccagggcagccagcccacctggcccggcccatctgcggagcgtccagtggagatgacgatgactccgacgaggacaaggagggcagcagggacggcgactggcccagcagcgtggagttctacgcctcgggggtggcctggtctgccttccacagctgacccccggcctgcagaacatctgtccccaagccagctccactgcccaggcccccaagagggcagctccagaagctgcccagggctccgggaccccatcccatggtggcaggtgcagcggtggggagtggctctttctggactcccagtgcctttttgctggacactgtgtccttatggcttcactgcaggtaatgcctttcccttcaggaagccccagaacacccacaggtcttggtaacaaacgccaccttacactctgcaggctgcagcggcagctccagatggcctcctgagctggacgaccccaggtctccagacatctagggaccagagcaggtttgggaacacagagggaagacaggatgggagtgtagccacagaacccacctgcaccctgacaggcacaccccactgaagagcctgagtcccaggaggcctcctggaagcccaggactgcccacccaccacgctggtgcccaccgcctggccagccaagccctgccgatcagacatgtgggctccccgaagcccagccagagactgccgtgctgtgggtgccaccaggcccagggactgcagcctgagctccccgaggcccagggcagccgggtgaggactctgtcctgtgtcacctctctccaggtgtccagctgtctcatgcctttttgtcctgtcctcagctctccgtgtggtcagcgaaaccattgttttctgttaggactcagttgcaagaacagaaaccctgcccccacttaataataaaaaagaaagtttattgatgggtggttgcaaaacaaa

SEQ ID NO: 16 - DNA, 49715 bp, Homo sapiens
  DNA (1)..(49715): PLEKHG4B
cgggggaccccacttgtgtgcagcctagacgctggttcagggagtcgtacatggaagccttgcggaaccccatgcccctgggcagctctgaggaggccctcggggacctggcctgcagctccctgactggagccagcagggacctggggactggggcagtagccagtgggacccaggaggaaacctctggcccccggggagacccccaacagaccccaagtctagagaaggagaggcacacacccagccggacaggtccaggagctgcagggcggactcttcccaggagatctcggtcctgggaaagggcacccagaagctccagaggggcccaggctgcagcctgccacacctcccaccactcagcaggctccaggcctgggggccacctaggaggacaagctgtggggaccccaaactgtgtcccagtagagggtcccggctgcaccaaagaggaaggtaaatgctccccacgccctcccctgcgcacccccacaacctcccctacacatcccacaatctccccctgcacaccccacccccttccctacaaacccccacaacctccccctgcacaccaccacaacctcccctgcacacccccaccctctcccctgcacacccccaccccttccgctgcacaccaacccactcccctgcacaccccaccccctcccctgcacaccccacaacctcccctgcacaccccaccccttccgctgcacacccccgccctctcccctgcacacccccaccctctaccctgcacaccccaccccctcccctgcacaccccacaacctccccctgcacaccccacaacctccccctgcacaccccacaacctccccctgcacacccccaccccctccccgcacacccccaccccctcccctgcacaccccacaacctcccctgcacacccccaccccctccccgcacacccccaccccctcccctgcacaccccacaacctccccctgcactgtccccctcccaccctgtcacagttttgtttggtcacttgatccacaagaagcctgtctccatgttcatattggcgctcacgttctggagaccacaagtccaacatcaagctgtgggcagagtgtgttcccctccgaggaccgggggcacccatcccgcctcttccagcttctggggctccaggtgtcccgggctgtggctgcagccctctgaccgtcctccgtggcctcctccccagtgcttctctgactcgaatctccctctccttgctcttgggcacccatcgctggattcggggcccctctaaacccaggacgacctcacatccagatccgtagactcagtttccaactggaggccacattcacagtttccaagggttaggagagaaaatgtgatgatttaaaagactaagtttgcaggacataaagtaagaaaataatgacaacatatttcttaaatatttcatttttttttttttttttttttgagtaaagaaatatcctgtgagtaacacaaccagtgattttggaaagaaggaaaaaatgtgaacatactgatgtaggctccagcaagtagggccacccaacctcgggaaagtgacaggctgagccctcctttccgtgggctccccccgcggtgcctggagacagccacgcctgccctgccaacccctcctacctgcctggcctgaccaggggctcggaggcaatggcaccacagcccttggaaacagaagtgtggcccagcccattccagccacctcacgagagcctttcgccttcaaagttaggctgctgtgcctggaacttctgacaggtcccggagagtgccgcacacacacgggacctaccgcagaaagagctttgtaacagaagtactcacttgggggcaacactacctgagagtattctgtcgcctcactgcaattcagctaaagtgaaaagaagtcctaacccctccccgtggtttccagcccctcacctttcctttgtattgattttcttccctgttgtactgggcagaaaagacacacacaatcttgcagcacccctcgcagtcacacacacgccataacaaccacacacagtcacatgcctcacatgatcacatgctcgagttccacatacgacacgcacacagaatcacacaacacacacagtcacatgcctcacacgatacacgcgcgcacagtcaccagtcacatgcttcacacaatcacatgctccagagttacacatatcacacacgcagtcacaccacacgcagacacatgcctccaacgatcacactccagagttccaaataccacacacacagtcacacaccacacgcagtcacatgcctcacacaatcacactccagagttccacataccacacacacaatcacacaaacacagtaacacaccagtcacatgcctcacacaatcacacgtgccagagttacacataccacacatgcacgcgcagtcacacaccacatgcagtcacgcatgctgcactttgagcagatgagtagggatgagatgacctgttcctcctgaggcgtctgcaggtagtgagcatgtctgtgagctggagactccgtctccgtgatgacgccgcgtgtccgtgatgacgccgcatgccctgtgcagtgggacatgctttcacttcccgtgtgaactgggacaagttttctcggaaccccctactttcatgcgtgtttttgtcccatggttcatagcaagctgagcatagcagctgctttcaacgcgcaggaaaaccttcatctttgacacggcctctttcctttgtccagacgttcttgcatcctcagcctgtgtcagcacagacggcggcagcctccattgccacaaccccagcgggccttccgatgtgcctgcccggcagccacaccccgagcaagaagggtggccacccggcacaggagacttccccagccaggtgcccaagcaggtgctggacgtcagtcaggagctgctgcagtccggggtcgtcaccctcccaggtgagagcacatgccaggctctcctgtcagggcggatctgacatctaagccgacagcacagacccagctcaccaccttgtaggagtgaagcccttggcagctgccctgtctctgtctccgcagggacccgagaccgtcatggcagagcagtggtgcaggtccgcaccaggagcctgctctggaccagggaacactcgtcctgtgctgagctgacccgcctgctgctgtacttccatagcatccccaggtgggacggggggcaaggccgcaccctgcagacccatgggaccccagctgcatgtgtgtggcaaagtggggggcacggggaggtgccagcttccatggccagactctgcctctcctaacctcatctttcagagcagtcagcacccatgtgcttccagccttgatttctacacaccatttcttgccttctctacacatccttcccagtgacacccacaattaaacacacctggctacggggcagacagggcacactcactctttggaccaggattcagccatccgtgtgatgtgcagcttctgccggctttgagtcagggttctcttatgtccttggctcacaagagtgctgtaagatcagtgtccagacacacaacttaattagaatgtcagttaatcctggagttagagctaaagaagtttctcaaagaacaaacacacacacaaatttttttttttgagacagggtcttgctctgtcgcccaggctagagcacagtggtgcaatcacagctcactgtagcctcaatctcctgggctaaagcgatcctcctcccgcctcagcctcgccaggctaaatattttttaagactagtcaagtgtagtagtgagaagggggaaagaatagaataaggtgtttgatctgtaatgtgtgtgaacaatcaaatgagataactcactaccttcagaccagctgaacactaaaattttgtaaaatgaatatatcaactcaccccacctaccattctctcctattaaattttgaactgaagtttctaatcacaatcacagagacaaagcttttaaattggagttttcaaaaccacatgatggtatttttagttttaaaagatgttctaacagtcttagcttggctctggataagtaaggaccctcctgactgatctcaagcttccatcttgggaacaggccatccacatcccatcagaatcaccttctgtgcttacgttaaagcccaaataaatgagggcaagaaggccctgaagtccttgctcccttgatggagcacggcccatttcgtccatccaggagcattggtgggtgtttaggggaaagtagccccagccccatgtgcccagagacactgtctgacatcagtagcaggttccacgagaggaacaacgtcagtgcctccagccgatgggcctgcaccttcgggaagtggaaggttgatgtgtatagagaacccctaacttctagagctgaaaggaaaccagtaacaactagcctcagaggtggagaaactcgttcttgtaagagatttaaccttcagtggttaagatgggctgtctttccctccccaggaaagaggtccgggacctggggctggttgtcctggtggatgcacgcaggagtccagctgcccctgccgtctcccaggccctctcaggattgcaggtacggcaaggttgtcatatcccttgggtgtgcagagcatcgtagggccgtgtgttgctggggctgcccacatcgtggttctggagtagccagtccacaggcttagtgtgaagattcgagatgggggcccctgtgcagagccacctccttcttggggtcttcccagtgagtccagctcttgctctctggggccaggcacagacactggggaaggtgggcttggcccatccgctggggacttggggaagcttcatgctcagggcaactgcaaacctaaaatgcaaagccagccaggcccgggtggtgggcacctgtcccaggagggcagcgcagccccatccctgcccagtgcagctgcccccgctatgcccctctgtcaggatggagagcacagcatcacccttcagacaaaggacagaggcaggaaggggcagccatagttcactgcaaggatgaaccagggtggggacgaacctggcagccccagacagggtcaatgccattgccacaggtccctgcagcctcgaattcccaggctcaagccatgctactgcctcagcctccagagtagctaggactacaggcgcatgccaccatgcccggctaattttttgtatgtttactagagatggggtttcgccacattgcctaggctggtcttgaactcctggactcaagcgcacccacctcagcctcccagagtgctgggctcacaggcatgagccactgtgtgtggcctaggggccctgcactgaaccataagcaacatccagagatgggaagcaccggggatgggaagatgctgctgcctgagcaggggcagatggaagctcagagatggggagagaccagggacaggggggtccagggacagggacagggaggggacggggacagaaccagggtgccctctcccatgccccacctgcactccacgaagctaaacccatttcgcccttgctgtccctgctgaagacggaggcagaggctcctatactcactgaggaatctcaagtttagggacaccaggtggcaggttgtgccaggaaagacatcagtcagggacagcactggcagagctcaccacaccatggagtcctccttccactccccttccatggtcctccctcctctccccctccatggtcctcactcctctccccacttggagtcctccctcctctccctacttgcagtcctccctcctctctcccaacctgtggtcctccctcctctcccccattctgcagccctccctcctcttcctttccatggtacttctttttctccccctccactgtcctccctcctttccacccccacagtcgttccacttctcccaccctgcccccctccctcctttcccacaccctgtgaccctccctcctccccaccatagtcctccatcctctcctcctccatggtcctccctcctctccacccccacagtggttcctcctctctcacaagctgtagccctccatcctctccccactatggtcctccctcctcttccctaaccctgcagccatctctcctcttcacccctgcaatcctctctcctcccctccacacagtcctccctcctgtccccactgtggccctccttcctcttccccaacctaaagtcctccctcctctttcccctaaggtcctccctcctctcctcccccagagtcctccctcctctcccccaaccctgcagttctccttcctcttccctaactctggagtcctccctcatctcccccctcctctcctcccccacagtcctcccttctctcccctgaccctgcggccctcccttcctctcccctggccctacagtcctccctcctctctctccaccctgctgccaccacttctctcccccacactttcccccttgcatcgagcctgcctccccttgccttagagtgaacctgcctcttgtccccctcctcactgtcagtcccgcctgtggtttcttcttactttcgcagtacgtggctcttcttagaaaatgtcagtgtcctacctgagacttggaggagacaggctcagtcatgaccccccttacagagtgggatccactcacattgagccctgcagtggcatcctccagaactccctgacagggtggctgggccagcagaaattggctggcctgggagcaagtgacagggaccttgggctggacaaggggctgaggtgactccctgaggtcaggaaggagtcactgggaggagagagcacaggccgaggtccagacaagaagtgccatgagttgggttgcaccagctaggctagacaggagtcctcagtgcacagacactgtcaggaaagcctcagggaggcctggagccaggggaggcactgatcagagaggttctgagagattctcaaggcctccaagaaaggaacatgaggccctgcaccacagcatgagcatgagctgtccctggttgggcacctgggcagtggtctgtgcttcacctagacaaagaaatgacagtcaaggaacagatgctaggggaggaaacagagctgaccagaggttacctgggcacaagaggaatctggaagagcgcacacctgctgagcaaacctaaggcagtgacatcagggtggaaaaaagaatacatatgcttattgttagtgttcaccaaaaaaggttcacagtgcgttgctctaaagctcagttagcttctctaacacaaggtagatacagtgtgaagtgccaaaactcagtttccataaaactttttacaagcatgtaagttccttattgactttttcaaaagaaattcatgtaggaaatgcatcctaactcattctatgatgccagcattaccctgatactaaagccagccaaagacactaaaagtaaagaaaactgtagagcaatatcccttatgaaggttgatgccaaaatcatcaacaaaatactagcaaatcaaattcagtagcaggctgaaaggattatacaccctgaccaagtacagtttgttcctggaatgcaaggatggttcgacacatgaaaactgatcagtgtaaacagaatgaagggggaaaaacacatgatcatctcaattgatgccaaaaaaaaagcatttgacaaaattcaacatctttcatgatgaaagcactcaatatactagaaatagaaggaaactacctcaacataataaaagttatatgaaaaatctacagcaaatatcatactcaatggcaaaaaaactgaaatcttctcatctaaaatcaggaacaaggcaataatgcccacttctattcaacatattactggaagttctagctagagcaattggacaagaaaaagtggggggtgggggagaagaggcatccaaactggaaaggaagaagtaaaattatctctattcccagatgatgtgatcttatatgcagaaaaccctaacagttccacaaaaaaaaaaaaataaataaaaataagttaattcagcaaagtagcaggatgcaaagtcaacacacaaatatcagtcacacttctctatgctaacagtgagcaatctgaaaaggaaattaagaaaacagttcatttacaatagcatcaaaaagaataaagtacttaggaattaaccaaagaagtgaaagactttttcactgaaaactacaagacagctgaaagaaattaaagaagacataaatagaaagatatctcatgttcaaggattggaagacttaatattgtattgaaatatcaatactacacaaagtgatgtatagattcagtgcaatccctatcaaaattaagctgttgtttcttgccgaaataggaaaacctatcctgaaattcatagggaatctcaaaggactccaaatagccaaaacaattgtaaaaaataaaaacaaagctggaggactcacagttcctgatttcaaaacttaacaaagcaacagtaatcaaaaaagtttggcactggcattaaaacagacgtatagaacaatggaatagagtagaaagccatgaaactaacaatcatatacataaatgatttttgaaaagggtaccaagaccattcaatggagaaaggacagtcttttttaacaaatggtgcttaaaaaactagatattcacatgcaaaagaatgaacttagattcttacctaaacaccatataaaaaattaactcaaatggatcaaaaacctaattgtaagacctaaaactataaaacgtttagaagacaacatagggcaaaagttttctaacattggatttggcaatgatttattagatataatatcagaggcaccagcaacaaaagaaaaaatggacaaatcagacttttcaaaaattaaaaaatgtgcatcaaaagactaccagacagatgtggtagctcattcctgtaatcccagcactttgggaggctgaggcaggaggattgcttgagcccaggagttcaggaccagcctgggcaatatagtaagactctgtctctatgaaaaaaaaaaattagctgagcatggtggtgcatgtttgtagtcctagctacttaagggtctgaggtgggaggatcgcttgagcccaggaggtcaaggctgcagtgagccatggtcatgccactgcactccagtatggatgacagagagagaccccgtctcaaaaaaagtaaataagaagacgctatcaacagagtaaaaaggcagcccacagaatggggggaaattttggcaaattatgtatctgataggaggttaatatccagaatatatagagaactcctaaaattcaacaacaacaaaaaccaaactgcccaattcaaaaatgaacaaaagacttgaatagacatttctccaaagaagatatatatgtggctaatgagcacatgaaaagatgttcaatgtcattaatgattagagaaattcaaatcaaaacctcaattaaataccacttccccatccattagggtggctattgtaaaaaaacaacaagtgttggcaaagatacggagaaactggaacccttgtgcacggttgatgggaacagtaaatagtgactcattgtggaaaacaatttggcagttcctcaaaaaagtaaatataggattaccatatgatccaacaatactgtgtctgggtatatacccaagaaattgaaagcagagtttcagagatttatacagctgtgttcatagcagcattatccataacagctaaaacacagaagcaaccttagtgcccatcaacagatgaatggataagcaaaatgtggcctatctttacgatggaatattatccagccttaaaaaggaaggaaattctgacatatgccacagcatgtatgaatcttgagaacatgctgagtgaaataagccaatcacaaaaagacaaacattccacttctatgagtactcagagtagcccagatcccagagacagaaagttgaattatggttgcctggtgccaggagcagggggtaatggagagtttttcttttacgggtgcagggttttgctcttacaagatgaaaagagttatggagacgaatggtggtggtggttgcactacgttatgaatgtacctaagactgctgaacagtacactgaaaaatgatgatgatagtgtttcaccacaatgaaacaattgaaaatgcacatctgataaagggcttgtatatagaatatatacggtctcaaaactcagtaataagaaaacaacccaataaaatatgggaaaggatttgagtactcttcactgaagatgatacacagatggcaaataagcacataaaaatatgcctaacgtcattaatcactggggaaatgcaactgaaaaccaaaatgaaacacacaaaaacagtaacaaagcttgacagtaacaaatgcttggtattgctgatggaaatgcaaaatggtacagccactctggaaaatacttacttatcacatgagccagaaatcccactcctagatatttatccaagagaaatgaaaacttgtgttcacacaatatttatagtgactttacccatgattgccaaaaactggaaacaacccagttatccttcagctggtgaatggatgaacagattgtggtgaggcataccgtggaatactgctcagcaaaacagaggaacaaaccgttgatctccacaacagggatgagttcccaatgcacaatgctaagtgagagaggccactcctgcctgagtctatttatgtctagaaaaggcaagtcggtggagacgaaagcaggtcagtggttgccaggggctgggcataggagagggcttggctacgaagaggcacaagagaattttggggttgcttaacagttctttgtcttgatggtggtgatggttacatgactatgctttcatcaaaacttatagaactattcactaaaaagggtgaattttattgtatgtaaattatacctcgataaacctgattacattaaaaattcataagggcaaataatttacatttcagggcaaagtcagccatgttttatgcactgtaggcactctgggaaactatgacagaagtagtaccactcaaaattgggcaattctattaatgaagttaaaaattagaaagctaatcagtaatatttatttcttatttatttcagaacaacacatctcctataattcatagtatcttgctgttggtagataaagaatctgcatttaggcctgacaaggatgcaataattcaggtaatggtttagactgtgggatcctgagtgatggataaaattaaacattaaggcacctagatgagatgaaacacatgaaggaatttagataagttctaattgcatccatgtgggagcctggaaacctacttcctaccccgtaagttcttgcaggagtcctgcagagtatgccatgaaaaacttaaaaatgtgacctttcttctccacctcatatggtttctttccttctctttctttgtatcttcctcttttatctgaaaacatcttcttcatttggcctcattctgaaagggtatttttgttacatctagaattctggtttgagaggagttctccttttcccctcagcactttaaagatactgctctgttgccttctggcctccataattttagaagaaaagttcatcataattcagatcattgttcatctctatgaagtgtgttaattttcctttggctgtttccaaggtacttcctttcttttgagcaaatcgcaatgcgagcgggcttggttttcttcattatccagtttaggcttgaacgttaaatttgtgaattcatgtctatcaccacctttaggacctttttagccattctttctgtctttttttttttttttcctttcctgagacagcatctagctctgtcacccaggttggagtgtggttgtgcaatcagagcttactgtaatctcaaactcctgggctcaagagattctcccacctcagcctcctgagtaactgggactgaaggtgtgcacccccatgccaagctactttttttttttttttaagagacaggttcttgctatgttgcctaggctggaatcgaagtcccggccttaggcagtcctcccaccttggcctcccaaagctctgggattgtaggcctgagccacagtacctggcctagttcttaaaaacttttttcctgctttattctctctctctttctagtacttcaattgcgtataccagtattgtcccgcagatctctaagaatctgtcttttttaacttttttcctctctagtcttcatatcaggttgttcccattgatcctgtccttagggtcactggctccttactctgtcatctcttcagctgttaaactcactaatgtggcttggctctgtgtccccacacaaatctcctctcaaattttaatccccacgtgtggagggagagacctggtgggaggtgactagatcatgggggcagatgctgttcttctgatagtgagtgagttctcatgagagctgatggttttaaagtgtggcccttccttactctgtctcttgcctgtaccatgtaagatgtgtcttgcttctcctttgccttctgccatgattgtaagtttcctaaggcctccccagccatgcaaaactgtgagtcaattaaacctctttcctttataaattacccagtctcaggtagtatctttacagcagtgtgaaaacagactaatacatttacccagtgaatgttttagttcaaatattgtatttttcagctataagatttccaatggattttaaaatatattttctacatctctcctgagttttcctctcctttcataaattgcaagcatttttcctttacctcattgagcacagttttaatggctgctttgaagtccttgtctaataattccaacatctgggtcatctctgggttggcctctgctgattgtctttccctggagaataggtcccattttctgattcatgatgtgtcacataatcctggacattgtgaatattctgctggggagactggattctggtatagactcacagtgttgttctagtgtgcacgtaacgtggttagactccaaccggcagctctgtgtcacccacagtgggttcagtttaattctgagtcttcccccatgtatgcacggttcagggtcagccagagacctgggcagagtttacacacataccgcggggcttcttccacagctgccgccttctgggaatccactttcactttccagtggtgtggccaccccaccccgtcctctgtttcttctttcttcaggcaagaaagatgcccattttcttattgtttttatattttatttatgtttttattttttgagacaagatcaagctgtattgctgagactggagtgcagtggtgtgatcacggctgcttgcagccttgacctccccaggcttaggtgatcctcccacctcagcctcctcagtagctggatctacaggtatgcactagcacgctccactaatttttgtattttgttttgtacagatgggggttttgtcctattgcacaggctggtcttgaactcttgggctcaagtgatccacctgccttggcctcccaaagtgctgggatcacaggtgtcagccaccacaccggccagatgcccctctcgtttcctttattttttttttgagacagagtctcgttctatgtcgccaggctggagtgcagtggcatgatctcggcccacagcaacctccacctcctgggttcaagcaattctcctgcctcagcctcctgagtagctgggaccacaggtgcacaccaccatgcccagctaatttttgcatttttagtagagacggggttttaccgtgttggccaggatatcctcgatctcctgacctcattatccgcctgcctcggcctcccaaagtgcttggattacaggcatgagccaccgtgcccagccccttccctttctttttctttttcttttttttacaaagccacctgctgtcaaaaggatgcctgttttctgttggagctcagccactcccacacgcgggcagcggccctgaggacggagccactgtgggaactcgcccctgctggccccgcatgcatcaggtgccccaacaatgagcctgacttggctcggctgccagggctttcaggaaactctccttatattttgtccagagtttgtgggttttatctgagaagggccacctctgccacaccagaaggagaagagccttgactcattctttcccttttccttcctcccttttttttttttttttttttggtttttcttcactgaggcctttccttcacttgtcttagctcccttctttcccgtcttctcgctttcattactgcacccagacccgtgctattatcagtgcttccagcaaagcaggggcgatactccttgagccagcctctccatcctctgaacccaggaatgagccatttacagtgtttgcccccaagagatgcatctggagccatgaccaacgagtgcctcttcttggcagtgtgaggtcgtgagctccctgaaggccgtgcacaaatttgttgacagctgccagctgaccgcagacctcgacggctcctttccctacagccatggtgactggatctgcttccgtcaggtaggttcagcctgcagctgctgcacatgcgacagtctctggggactttctgttatgtggttgtttttactagaatttgaaaagggcatcaccgtccctgatctgatgcttgttacagtcgccgttcaggtcttcgtgtctacacaaccacgccgtggtgcatctgagaatgccgagcccgggtgggaagggcactgccgccccggaagtgtctgtagatctcagggatcttcacatatggaagcttcccaacccgagatcggtctaaatgcagaaactggaactcacagctgcttactttagcatttaacagactgtgttcttataatctcctccctctcaactcacaacagaggctggaacacttcgctgcaaactgtgaagaagccatcattttcctacagaattcattctgctccctgaacacccacagaaccccaagaacagcccaggtgagtcctcagacttgcaggtaagttcatttcatgtgacaggtaggtgggggcataaaggttagccaaacttgaaaataaatatttggttcactatcatctgtagcagagaccttcaaatcctttttcatttgtagatccctcttaattcagaaaaggccatttcctcccctttgtcaccaaaaacatcccacccgacccagaaggaaaaccgtgccacagcatttgatgatatgcaacaggtgtgagcggcaaccgctgctcggaacgagccattccaacaagacacagaggcgaactggccacagggctcttgacagcccagccgccaggtctaggggcccagagtctgtgagtgaggtctgcatgtctgtccctggtctaaatggcaggttcacctcctacagctgagctttgagcccccttcttctccctcccagggatcttatcctggggcccaccctccctgggacagtccggaccatcagcttgaggagtgggcactgtcatgccgccaggcctgcagcttgatttatggaaacaggacattcctgccactgtcacacttgggaggacctgccccttggaggagggagttaaaggcttattcctccccatcccgtgcaggaagtcgccgagttaattgaccagcatgagacgatgatgaagcttgtcctggaagacccactgcttgtgtctctcaggctggaggggggcaccgtcctggcgcggctgaggagagaagagcttggcacagaagacagccggtgagcgctcacaggggtcatgctgggccctggcccatcgagggagctgctcgggggagtttgcaccaggaggcgtagcgctctgctccaaggagagccccctctgtgcttggtccagacctccattctgacagccacgctttgcctgggtcagagcttttccacatttacaggctccaaagatcaaggagccagcttctggggatgctcggcaggaggtggtcagagtgcatcagaatgagctcattcttgaccagtgctgcctggggagctgtgcccacccccagcagtccctgtccatctcagctgcacacagccagtcccgcctaagctgccccacctgggtcccctccaggcacctgcaacccaggccggccaggatgttggcagaacgcatggagcacatctgtgccccgcctcggttgtgggcctcctcctggggctcccgttgccttgtggcatgagggaatggaaagagcagggtttttatatggggttgtcaccaagagcagattcctcaaggggccgcctggaagcctgaggactgccttctcttcctcagggacaccctggaggccgccacaagcctgtacgaccgagtggatgaggaggtgcacaggctggtcctcacctcgaacaatcgtctccagcagctggagcacctccgggagctggcgtcactcctggaagggaatgaccaggtcagagctgcaggaggaaggcggcccggtcagcatcccctccaggccaggctggccaaggcaaccctctcaccttcacactgtgtctttagggccttgatctgatttccatttggaatgaaattatgtcaggatagggcatgccttgctgcttgtgtaaaaagaaataaattttattttttacgtgagagatactggatcagtggagaaaaaaaatttgtttaatccagaggaggccagggagaaaaataatttcacactgtgccttctgatgctaccagtgtgaatagctgggtgtatcttccggacgctttctccatgtgcatgcgtacacagtgactgagaagccgaggtgaaaccgacacaggtagagagagtctgggccaaggttgaggacggcagcctgggaaacacctccagatgacctcaagaagtggctctggaggccagggagaggctcaaggttttaaagaaaagaggacaaatcgggagggggtgatgacggaagtggcttttcatgaattctctgggtcacagaaatggcattggtgggggttggccacacgctgctggactacagggtgtgagttgtgcacagtgtgtggcgtggctggggttattgatggcccttggtggacacactgcagaatctggggtccatatagcagtggctctgaaatgattgcttagctcggggggcaccagcgaaatgattgcttagctcaggggtgcagatgatgctgctgcctcattttgatgcccctctgggcctgacagtttaaggggtgcacactcagataaaaagtttctttcttttctcacatataaactcttcaaaacttgcacatttttatataaatccttattattttatcaacaactattgctgcgatgaatgtgcgggtgaaagagccagcagcatggagaggcagcagtggggtggaggcatccccagccctcctgtctgctggcaaagctcccccggccttcaggtccatgcgcgtgccctcacgggggcctccagacaaagacgtgcagcagggacgcgaggcactgtgcatgctcctggcctccccacgactgaccccagctcccaaatattggccaggggcccagctggtccaatccctggggcaggaacaggaaccccacaccaggcaagtggagtccaggccaagctgcagccaccagccagtccgggctgtctccagtctgtgccctctgtcctgggggtctcctccatctcccctcctccctctgctctatcctggctccatctcccctcctccccctgcccatcctgggggtctcccccatcttcccctcctccccctgcccatcctgggggtctcctccatctcctctcctccctctgcccatcctgggggtctcctccatctcctctcctccctctgcccatcctgggggtctcctccatctcctgtcctccctctgcccatcctgggggtctcctccatctcctctcctctctctgcccatcctgggggtctcctccttctcctctcctccctctgcccgtcctgggagtctcccccatctctcctcccactgcctattctgggggtctcccctatctcccctcctccctctgcccatcccagggggtctcccccatctccccctcctccctctgcccgtcctgggagtctccttcatcttcccctcctcgttctactccgtccttgggggggtctcccccatctcccctcctccctctgcccatcctgggggatctcccccatctccccttcctccctctgcctgtcctggggggtctccttcgtcttcccttcctcgttctactccttcctggggtgtctcccccatctcccctcctccctctgctcttcctggggtctcctccatctccctccccactctgccccatcctgtggtctcctatttcctgtatccaagtcttcctcttttttcatttactttggcgttttatgcagaataacttccaggacttcccagagaaagggatcttggggtgagcatttttgaggccgtggtatctaaaagcatctctactccaccttcatggccagcagtcactttagtttcccttcgccagctggaaggccctgcgcctgtgcttagcttccatcccactcccagccttctgcctgtgccctgcttctcggtggaagccacagactttcctgtcgtcctcggggctctggaatctgagggttgcccaggtgcgctgagggcaggtgtgcccgagggtcacccaggtgcactgagagcaggtgtgcctgagggtggcccaggtgtgcctgagggtcgcccaggtgcactgagggcaggtgtgcctgagggtcgcccaggtgcactgagggcaggtgtgcctgagggtcgcccaggtgcaccgagggcaggtgtgctctttgtgtctgcactgcgcccctctgttctgggaattctgtgacatccttcgtggcgctcgcatttcccacagctccacacttccatctggttctggagttttctgtcctgttgccttaattttccccacccctggctgtgtgctgtccttgtaaggtagatttttctcagctttaccctctaactctattattgagttttttgtttctgctcttgctttttaactccatgggcttattttctgaacagtcccctctccatactaatcatgatgagtctgcacagtctgtggcttctgtgggtttgttctggcgccagaggctttcctggcgacccctggctaggaagcctgtggcccacgcatctttagcattttctccctggcggtctgattcttttcctctaatcccggcctgaaaggagagcctggccgtagctcagtgttcacctgccagggaacagaccctgggccctgtggagcagggtgcccagctccttccctccgacactccctcaccctgtcctgtggagtctcgggacttggcctctgctctcctcaggccctgccactcccgcttccttcccggcctccaggtttgtgccctggctgctctctgcccaccgtgctgagtgttacgccttggaagatgcttgcagggctttagtggtgtctcaagaggacacgtctcactctgcagtcttcacccagaaactccacgttgtgaccggacaggcgatcctgctatgtataggtgcacgtctgtctctatatatttaacctaaaaagtgcatgcacactgtgggaaaattagaaacaaatagatttttacacacgggatgccgcatgtggcggcctcggcaccctgtgtgtgggcatgcgctgcaagctcagtccccgagccatgttcacacggctcccacactgaaggccctgggctcctcccctctctgctgttagaaactccccatgttgaacatctctgtgtctctgcttccttcacagcctgtgggtgttgactctggatacattcctaggctcggatggctgcggtcagaccatttgtttttggaggtttccacgcataagccgtggcactccagccgcacctgcctcccgccggctgccccgtggggaaatggagcccctaaacagtgtgccctcagattttctatgcgacagctggacattctcttcacacgtttattatttttatttctgtagtgaattacttgttcatgctttagacagtttttctagggttgatcatcacttctgtctatgttatatggatccttcatgttctgcttgttttcctagtttgtcatttgccctctagctttgcttatcttttaaacagccctttctaccttaagttatagaattattagtgtatttcatcatagaacctttatgacttgaatttttgtatttaaatcttgaaaccaatgacagccgatttttccacaaagttggaggccaggctccagctctgcgccacccccactctgctctgccgaagccgcacctgccccttgcctggcagttgcaagactctgcccgtgctcctaagaatcaagatgctgtgattttcttcttgactctggctctgtttacagacagcgtatgtgctggtctgtctctcctctgctgcatgtctggggtcattcggtaccttctgatggtcatggatccaggcagctgttctcttcttcacaacaggcctctcatctctgggcatctgacccctagtcgcccctggtgttgctgtttaacgacaacatgaagggcttacctctgacatttccactgaatccagcagtaaatgcctccaaaataagaaccttggtcttgtcaccagggcgcgtagccacaggcgctccgtccagcagggctcagccaggggctcccccatctttcccaggcagcctcaaggggccaagcagccactggcctgaagaatatttctggaatatgcttaccatattaaccagtttcaaaatggaaagtcctggatctattgttcaatgattttaatgtccttttccaaacaatgaaaatagtttggagcttgagcctcagaggcccgtgccacctctcatcagtcgtgttcattcacgggtggttacgcagccaggctgtcagccctgtgcagcgtgtactcaggacatgaccaagacgcatccctccctcggtcctgctaaatcctagagtgtgacttcttcgcatgtttaaatataaaatgttcttcccctgtgtagatcaaatcatagtttggaaaagaactagagaaatgcctcggtcctttggtgcctgctctcgagaatgagaggcagcagcaggcagcactgtgggccgtccgagccttggtgccagtggctacacgcagacccagcccacacctggagacatgaacgtggaagcaccgggcttgtactgatgctttgttccttgggtacagcaatcctgccagaaaggactacagctggcgaaggagaacccgcaacgtacagaggaaatggtccaggatttcagaaggggcctgagcgccgtggtcagccaggctgagtgcagggagggagagctggccaggtggacccgctcgtccgagttgtgcgagacggtaagagacccagtgggcgtgcgtcccagggatcccggctccttaggctgtggacatctagcaagtgcctcccctcacaagctggagtgggccaggctgtgggacagaggccgggcacctgcgatggagcccccctggccactgcgcccacggctctctggagaaggctctgagccgacctgtgaagcatttgatattgtaccaaacagaccagccaaacgaacacacacatttctctgtgtgtttactggctcagttagaaaattccactgattgcccaaaaccctaaacaagtgctacagcagactgctcgcctgcgagctcccacgcgccccagaccgcacgcctgcgagctcccccgcgccggggactgcctgccattaggagcccgggccagaggccacggagctcacctgtcaggacagcatttgaggggtcatggggtggccagagcagggtagagccgtctgccccgtcacgcctctctcagctcacaggatgtggcataactgatctacacaatgtcttcacgtggtcctaggacatcccccacggtgccctctggcatggcgaacagaccccatggggtcagacacagcccacctgcccttccgctgaacccggccacagcccccactgggtggcgggactgcctctcgctctgctttctggccccctggtccctgaataggctgacctggggaacagcagggcctgagctggctccagggcagcccctcctccactgcactgagcagagccctccttgtcccacaggtgagcagctggatggggcccctggacccggaggcttgtccctcctcacccgtggctgagtgtttgaggagctgtcaccaggaggctacctcggtggctgcagaggccttccccggggcaggtgtggcagtgctgaagcctcatgccctggggaaaccgtgggcatcacagcaagacctgtggctgcagtacccccagacccggctccgtctggaagaggccctttctgaggctgccccagaccccagcttaccgccccttgcccagagccccccaaagcatgagcgtgcccaggaggccatgaggaggcaccagaagccaccctcattccccagcacggacagtgggggtggtgcctgggaacctgcgcaaccactgtccggcctccctggacgagcgcttctgtgtggacaggacggggagaccctgcgcccagggctgtgtgctctgtgggacccactgtccctcctcaggggccttccaggggcaggggccaccacggcccacctggaggacagctctgcctgttcctctgagcccacccagaccctggccagccgccccaggaaacatccccagaagaaaatgataaagaaaacgcaaagtttcgagatacctcagcccgacagtggccccagggactcctgccagccagaccatactagtgtcttcagcaagggcctggaggtaaccagcactgtagccacagagaagaagctcccgctgtggcagcatgccaggagccccccggtcactcagagccggagtctgtcctccccctcggggctccaccctgctgaggaggatgggaggcagcaggtgggcaggtgaggtggacgtccccctcctctcgtcctagcagtccttggggatctagaaacccaaagccatttaggcagtaaactctcttctgcaaagtagaaagtaaatccgcagacatccctctgggtccacctgtccggtctaagaagaaacacaattttaaactagatatgagttacctgcccccatgtccggaagggaccactgaaaactgcctggatggtgtgtggtaacctgcacacactcactctgacggttaagtaactgtgcgaccaactctagttattttcagcccacttacagaaaattacaagcagcaaatcaaccccgacaccaagaagagttaccttaaaaataacttttaaaaagtctcttaagtgttaggggttagaaggcgcacccatgcgcccattgccccactgaagaggccccttctcacttgtcgagcctgcaaaggacgcgtccactcattggtaagggtgggcgcactcggcccctgcctaggccggatgccgtctgaacctccatcttccacccatgtggtactggtcgtgagggctagaggtggagaatttcgtgagatgctttgctcatttggttggcttctgtgtcttgggccagcaatccccatcctttttgccaccagggacaggattcatggaagacaatttttccacagaccgcaggggttggggtatggttttgggatgaaactgctccacttcagctcaccaggcattagttagattctcataaggagcacgaaacctagatccctcacatgtgcagtagtgttcgtgcttctccgagactctaatgctgccactgatctgacaggaggcggagctcacacagtaatgatgtgactgggggcggagttcacccagtaatgctgtgacagggggcggggctcacagtaatgttgtgacggagcagagctcacactaatgctctgacagggggcggagctcacacagtaatgctgtgacagggggcggagctcacacagtaatgctctgacagggggcggagctcacacagtaatgctgtgacggagcggagctcacagtaatgctgtgacggagcggagctcacactaatgctctgacgggcggagctcacactaatactctgacagggggcggagctcacactaatgctctgacggggcggagctcacactaatactctgacggggcggggctcacagtaatcctctgacggggcggagctcacactaatgctctgacggggcggagctcacacactaatgctgtgacggagcggagctcacactaatgctgtgacagggggcggggctcacagtaatgctctgacggggcggagctcacacagtaatgctgtgacggggcggagctcacactaatgctgtgacggggcggggcttacacactaatgctctgacggggcggagctcacactaatgctctgacggggcagggctcacagtaatgctctgacagggcggagctcacactaatgctctgacggggcggagctcacactaatgctctgacggggcggggctcacactaatgctgtgacggggcggagctcacacagtaatgctgtgacggggcggagctcacactaatgctctgacggggcggggctcacagtactcctctgacggggcggagctcacactaatgctctgacggggcggagctcacactaatgctctgacggggcggggctcactaatgctctgacggggcggggctcacactaacgctctgacggggcggggctcacagtaatcctctgacggggcggagctcacactaatgctctgacggggcggggctcacagtaatcctctgacggggcggagctcacactaatgctctgacggggcggggctcacactaatgctctgatggggcggggctcacactaatgctctgacggggcggagctcacactaatgctctgacggggcggggctcacactaatgctctgacggggcggggctcacactaatgctctgacggggcggggctcacagtaatcctctgacggggcggggctcacactaatgctctgacggggcggagctcacactaatgctctgatgtggcggagctcacactaatgctctgacggggcggggctcacactaatgctctgacggggcggagctcacactaatgctctgacggggcggggctcacactaatgctctgacggggcggggctcacagtaatcctctgacggggcggagctcacactaatgctctgatgggacggggctcacactaatgctctgacggggcggggctcacagtaatcctctgacggggcggagctcacactaatgctctgacggggcggagctcacactaatgctctgacggggcggggctcacagtaatcctctgacggggcggagctcacactaatgctctgacggggcggggctcacagtaatcctctgacggggcggggctcacactaatgctctgacggggcagggctcacactaatgctctgacggggcggggctcacagtaatcctctgacggggcggagctcacactaatgctctgacgggacggggctcacactaatgctctgacggggcggggctcacagtaatcctctgacggggcggagctcacactaatgctctgacggggcggggctcacagtaatcctctgacggggcggggctcacactaatgctctgacggggcggggctcacactaatgctctgacggggcggggctcacagtaatcctctgacggggcggagctcacactaatgctctgacggggcggggctcacactaatgctctgacggggcggggctcacagtaatcctctgacggggcggagctcacactaatgctctgacggggcggagctcacactaatgctctgacggggcggagctcacactaatgctctgacggggcggggctcacagtaatcttctgacggggcggagctcacactaatgctctgacggggcggggctcacactaatgctctgacggggcggggctcacactaatgctctggcaggaggcggagctcaggtggcaacactccctcgcctgccactcacctcctgctgggcggcctggttcctaataggccacagatgggtaccagtcggtggccctgggggttggaggcctctgccttaaggtccatagaaggggtttcctcctcacaccctgatcataggtttaatctgaacggagaaggcccaagaacactcttctgaaacacacctttaggttgccagactcagtgtttaccttgttaaaggcaaagctccaagtagaacattaagttctggtttttaccattggtgtgagtgatccagggtgtatctgccggctgagcccttccgaatccgtaagaggaacgccaagcgctgtccctgagtctcagcaagtggctgcactgacgtttctgtctccactgagcccatgtttcaggtttggggggcagcagaacacaggaaggggggactcctgccgacccccgtgtgatttccagcctttgcttcctagtgagtacattgtccatttactttgatcaagacccaattaagactgtcctcattctgattttgtttctggatatttactgaggaggcttttgtgtgggtcgtgacactgggcctcggccttcccgccagtgctgtgagggccagttcctgaccagccaggaggtgctgtgttctcagaaacagtgagaatctgtcaaatctgttatgcaggagtgaaggggacaagttctgcagctctgctgtgaatgggatgtgcgttcagcagcatttctgcccacagctgtgcttcccatcattagctgctttttagtttttccaacttaaaaaacaagtaaatacaaataatggtagaaaaaaaatctgccaactcccattggtatcatcaggatcgagttatttaaggaggttgggggtaagatgccatcaagtagaggagaaaagcaacgcacctcactgttcattagggcagggcccccggctcaccatggccctgggaaatctcctttgaaagtgcagtggatggtgctgtctgaggtgcagagctgtgggacacgcccagatcccaccccagcagaacccagagaaccttctcctggagagtcccgccgcccaggccaggctttggcattcatgctgccggagtgtgggccctgccctccaggctcacatgctggccactgctcagttgctgagagtgaccaggtggccccactccagccagctcatgaaacagagccaccagcctaagcgtcctgcatttgtttatggtgtaaaagtacttttggatgcttagcatgttttttagtggtaataaaaaaattaaaaaataccacctgatttgggaagcccagtttgggcctctatgatcacagcactgcagttttgcacgggaggtaccgtctggccaagctgaccacactggccagcccacctctccactctctcagggcaacacgagtggatcctctgggtcctgccctgccctggggatacggaggtagtgagacttcgggcagccacagaggagcccacatctcctgcagatgtgtgtgttgtcaggaagggctcttcaaagactcagaagtgcttcagaggctcacccctcacgggaacagtgctcctacaaaccctgcttggcagcccctcctcaggacgctcattcaaggcagggagaccccagccaagggtggggctgagggttccgtggagggccatccctggggcctagcctgctgttgtccacctctgggccgtcctgcgcccccggccttgctctccggccactgcagcccccgagtacccctgaagctgctccttaaggtgctgagccccttgggtcaggagtaactaccatggaagctgaccctcgagaaaacctcctggtcagtcagcagtgggcaaggatccaaaagccgttttctcacgaaatttccaccacagccttccttagcagaagcgtcactgctggaagtgtttgagtcatctcaccgctagaatgaaaccagctgggaacgagaaaccttatgttcagagtttcagttaggaagcctgggaatctgtctgtcttggtttccaaagggatctttcctctgaaaaggccatgatcaataatgtggaaatgtttcacctgacaagtttctttttgaaatatagtccttatcttttcaagttactgtgtatcaagagagcagctccaggtaacagggagagaatgagtggaggtgcaggtgagtcgctccttgctgaggatgtgcagtagactggaagattattctttttttttttttttttttttgagacagagtctcactctgtcaccaggctggagtgcaggagtgcagtggcgtgatctcgcctcactgcagcatccgcctcccaggttcaagtgattctcctgcctcagcttcccaagtggctgggactataggtgcctgccactacccccagctaatttttgtattttgagtagagacgaggtttcaccatgttggccaggctggtctcgatctcttgacctcgtgatctacccgcctcagcctcccaaagtcctgggattacaggcacgagcccccacgcctggccggaagcttttttatcgtgcatcccacatgtgcccatgtgcctccagtccacatgtgaccctgctcatccctccgggttttcatgtgtttctgtctcaggcatgaattgcttttaataaagtgtccgtggggggccgtgtgccccccgggatctctgtgtcttccagcagccgactgaggcacatcatggccgagatgatcgccacagagagggagtacattcggtgcttaggatacgtcattgacaactattttccagaaatggaaagaatggacttgccccagggccttcgagggaagcaccacgttattttcggcaacttggagaagctccacgacttccaccagcagcacttcctccgggagctggagcgctgccagcactgccccttggccgtgggccgcagtttcctgagacacgtaagtgcaggccatggcgtgggtgccgggcaacgtggtgggtgaagccggtgtcagagaggcggggcctacagggcccacgtgtcaggcggttggaatagcttcagtccaggtctaggagctggtcctgacaggatgttaagaccagccgaaaaacagatgccccacacggataacctgtgggtctccagtgctcggtgctttgcgcgtggtgtgaccgactgtgtccctgctgcccctggaggcggaggctcacagacaccatcacacccattctgccagcagcccttctcctttaccacttccagctgataggccagaagcagttcccagaatcaccttccggggagaggccaggcctcacctcttcacacgccccctgcccctggatgccccattacctgccagagggaccagcctgtcccgttctgagaattccctgtgaggctttcaactggaagcacgttgaatgtacagacccagtggtctctcctcgtaagttgcttctcagtgatgaatgtggaatctctctgtttgagagtctttaataaagtttttaatttactctggaaagaaactgacaggctttcaacaggcattcactgagtgctgtgggcagatgggatgtatgtcccagaccactgagcacagattatcacaacgaaaacagccgtggacaaaagaagcgcatgttacatcttttcagtgtttcctttttttttttctttgagatgaagtctcgctctgttgcccagactggagtgcagtggcacaatcacagctcacagcagactccgcctcccgagttcaagtgattctcctgcctcagcctcttgagtagctgggactacaggcgccgccaccacgcccggctaatttttgtatttttagtagagatggagtttcaccatgctggcgaggctggtcttgaactcccaacctcctgatccacccgcttcagcctcccaaagtgctgggattacaggtgtgagccactgtgcccagcctcagcattttcttaaaaggtgcttttagacataaagtgcagattcatattgaccgtgattgtggcaattttaaatgtcttgacagctttagctcttggccatggaccaaatcattccaatgccccccacgccctcccaggcccactgccagctgcatcctcttcccccctcaaccccctggagtctgtgttttaaagacaaattacagaattctcagcattgaggcttcagctggtaaactggtcacccctggagccctggtgttggggatactctgatagtctttaatgaagggccgagtctccctttcacctgatcatggtacaaactgcacctggggggtcttgggacgggagcagttccaagtctgacccgggctgcgggagcctgctgtctctgggcctgtcactcccacagccaagcagtcgcctctgcttttccaggaagagcagtttgggatgtacgtgatctacagcaaaaacaagccgcagtcggatgccctgctcagcagccatggcaacgccttcttcaaggtcatccccctcggcccgccccccacagcctgcccggccctcagccaggccggagctgaccctctcacccggcccttgcaggacaagcagcgggagctaggtgacaaaatggacctggcctcctacctgctgcggcccgtgcagcgtgtggccaagtacgcgctgctactccaggacctgctcaaggaggccagctgtggcctggcccaggggcaggagctgggcgagctccgagccgccgaggtcgtggtctgcttccagctgcgtcacggcaatgacctgctggccatggacgccatccgcggctgtgacgtaagtgcctcagacgctggcagctcaggcaagctgggggaatttgaggctgctggtgagaaagtcttggccccagcagcacacttttcttggtgatgtgctggcagatttgccccggagaagtccctcaaagcacagccttctgaaggccgcagcgggggccacctggaggagggtcttacctgtctgggcaatgtcagggagcagccaggctcgaggcccctggagccccagggtttgacaatggctggcagatgttggctgccgttctacaggacatgcaaagcaggctggctctgaataactggaagtctgcttacctgggctgtatttaaaacaggtggacgtgagcgctgcaccccagccctctgtgagaaggcactagggccagggcgtggggctgaccttggctcgttcatacgggcccgcggcagctcacccatatgctgctgcccgcgaccggctgcatgggtctcatcaggcccctctgcgggggttgtgcagctcagtgtagtgaaggctgccctggctgccccaaaccccagatgcccaaaaggccacgggtgagctgagaaatggccggtgcgtgggggcgctggctccactctggcctgggatgggtgacaccccaatggcagagcagggccgtggagggtgggaccccacatgagctggaaaaggcaggcccatctcgggcccccaacaccgacggaatcggggctgcttctaggaagtggtatagtcagtcttcctggtcacttgtgtggaggcgcctcaggctgtcccagcatcctcagccaaggagccctaggggcgtccatgggatggaggtcatgggagaggctctgccaaccgtgcccgtcatgcgggtaaattccactaggggagggacagcctggtgggcacggcggctccatctctgggggctgctgtctcctctgacccagcttgaagggatttctgtggggacgagggaggagctgtcggattcccaggggctatttagtgagggggactctagcaccacctcagcagggagttccatcaaaatggacgcgagggctttgaagaagaaagttccataaatcgcaacaaggtttaccttgtgatctctgcacgtatgacccgggaacgggggccggggtgggggtgtgggacgctcaccccctgagcagggctcctcccctgtgtgtgggcccagagggtcaaacgggagggttggggggaactgggtgagttcctgagcttttagatgtgatgctgcagtttctatcctgatgctctttgaaacctttaacagctaacattaaggcggatttgccagattttatggcagtttggctgctgttccgtcttgtcacgaagctaacacatttagacggagacagtgacctgtgccaccacagacgccggattttcttggatgaaatccacctgtgtgttcctctgcaggtgaatttgaaggaacaggggcagctgagatgccgggatgagtttatcgtttgctgcgggaggaagaagtatctgaggcatgtgttcctctttgaagacctcatcctgtttagcaagacccagaaggtggagggcagccacgacgtctacctgtacaagcagtccttcaaggtagcacccgcccggtccgattgggtgcaggccgagccaggccctccaagggggtctcggacccttgtctcacctaaggccagcagaggaactgggagggagtgaagcggggaggagccgcactgcgatgtttgttttctgcggttcttgggtaaattcttgaaaacgttagccttccaaaagctgcaaggagaagtgtgtcttctccagtcccatgtccagtccaggggctgagaaacaagtgcctactcagtcagtaactgcattttggatcctgtgcagaggtgaacacagggacaggccttcccctggctctcggaggtgcacagggagggctttgctgatgcaccacgttgggcaggttcccacttgtgactcggctgtgctgagggaggggaggtccctcccttcttgacagagtccatgagggtgcatgggctcacacacaagcagcctcacagactcatgcatagccttgcacactcatggacagctgtccttcacattcaagcactctcccttgcacactgttaagcagcctcacacacccatgagcagcattgcacacagggacagtcctgtacagtctcctttgcacgctcacaagcagtcactcacgagcagcctcacacacacggacagctatcctgcacacaggcactctccctggcacggtcacaagcagcctcacacactcgtgagcagtgtggtctcgctcaccctgacccatcccacacatttgtcatttggtgtctgggtgaagtgacctccagcactgaggaatttgggtagccagttgttcagagaccatgttcctgatggtgctgcaatgggtgtttgctgactgcagacggccgagatcgggatgacagagaacgtcggggacagtggcttgaggtttgagatttggtttcgcaggcggcggaaatctcaggacacctacattctccaagcaagctcggcagaggtcaagagtgcatggaccgatgtcatagggaggatcctgtggcggcaggcactaaagagcagaggtgggaagatgggggccgcagggcctgccaggctcaggggcacagctaggggcaggggtcggggctgggactggggtgagagccaggggctgagtccaggggccagggggctgggggccagggctagagctggggctggagctgtggtcggggactgagtccaggggctggggaatgggggctggggctggggtgggggctggagactgaatccaggggccagggggccagcagggccggggtgggggctggagactgagtccaggggtcgggggctaaggctaggagtggggctggggtggggactggagactgagtccaggggccgggggccaaggctaggagtggggctggggtggaggcatgggttgggagctgggctatcaaccttaatgctgagattcaggcggtatgattaaatattgagttcacttgagcacaaagtctgaggatggccaactgggaggatacagacttcaaagggatggggtcattgccccgaagtggggaggtttaagggccatttgtataggcacggtctggggaaacaacaggatcacatcattttctatacagggttggtgcacagttatagcagtttggttggctgcagtcagcgtttcttttttggtaagggtgaggggtatatttcgcattccacgttagggacagaatagccaagggtcttctgtctcagggctctctggtctgagccaggaacagggaggcaaggaaatctctaacaaaaggtcagaaatgaaggggctgagctccgtgactcgatctccaaagtcagtctctctaagggcctaatcactctgaggagcctccagtagccgcactgtccattttcttccccatgggcacccaagaggcccacccggtctggggcacctgggggctcctcggtcagcacttgacaagaaagctcttggattggccccgacagcactcacacacgtgtctctcgtgtccacaagcgaacataaggcactgcggcaacccgagagagtcccccgcaggtctggttccatgtttaaccctctggttgacttcctgcccctgccctgctggtctggcccccgtggccctgggaggctgagctcatggtcagccctcagtcttcctgcaggtgagagggccctccccagagcactcattccccaccctaggatcccttccccaggcctcctccctcaatgtccaccctcgtttgctccccccaccgacttcttcactgagggtgactctctgtgcttattcctccagcctggcggctgcgaacaccaccttcacagcaaccaccccccaccccagaccttctcccacactgagctccaactccaggtcctgccccagcacctcacgagtagccaaagccactgtaaacccagctgtccctctctaccctacaagcccaccctggcagctctggcctctcagacctaaaacccaggcacccaagctacagacacgaccagggctcctgcacggctgcaccccgcctgagccctgacccctccaggcagacacgaccagggctcctgcacggctgcaccccgcctgagccctgaccccctccaggcagacacgaccagggctcctgcacggctgcaccccgcctgagccctgaccccctccaggcagacacgaccagggctcctgcacggctgcaccccgcctgagccctgaccccctccaggcagacacgaccagggctcctgcacggctgcaccccgcctgagccctgaccccctccaggcagacacgaccagggctcctgcacggctgcaccccgcctgagccctgacccctccaggcagacacgaccagggctcctgcacggctgcaccccgcctgagccctgacccctccaggcagacacgaccagggctcctgcacggctgcaccccgcctgagccctgaccccctccaggtgaagccaccacctccccaccggcccctgaaacactccggagccagctctgtcagacacagggggccccatggcgtcgccacaggctccccctctggcccccagcctcctggctactccacacccccgtgggcttcacccctgtgcagcccccaacagcagttacttggccagaggcctcacctccgagatgccaccatcctgaagagccttcctggcctttttccttcctttgtaacccacggtcctgcttcctgtttggggtctgcctgactgtagtgcacaaagtctccctggggtcgatctgtccatttcaacccctctggtgttccaagcacctggagcctgcaggaagtaggccctgccagccttgaataatcagattcagaaaatagaactaagttgattcaagcgcaaagcatgagaatggccgccccagaatgcagcctccaaagggacggggtccgtgctcgcaagtggggaagctgaggcttcacttacagagacagaaacggttgcagccaacttgacagcaacttgattactacaggttgctgcattccaaggaagattgctttaacattctgtgaggaggcggaggcttgttctgagagattcttatctctggtgcttcccggtcatccctgaccatttaccagaaaaagcagaaggtgcagctgatgctcagagactcggcattgctgggttcctctcagggttcagaataacttacagttcccacagcgttgagttcaaattatttagtttcacagccttcctcaaacagggtcaggtgggcagctgagcacagggtacgcacacaggactctgcctgggcctggggctgtggggcctgggccacagagctgaccaacctctgcaggtacagctgggtcacctggaaagtggagcctaatgcttttcaggtgtgtctaggacctggcaccccctccccattgcgtcattggtcacttaaggcctcttgacttctccagttttgccagggatttgccaaattagtcttctcagaaaacagaattttggtttaattgattatctacacacttactttctatttaattaatttctactctttgttattttcttgtgtctaactttttcagtgtttcatttgcttttcctttctacctaatttcttgaggtggatgcttatatcattgatttgagcctttgttttgttctagtttttgtgccgtatttaggactacaggctttcccctaagcctggctttagctgcatcccagaagtttgtatatgtcatgtgtctattcacagtcagttcagtatattttctaacttccactttaatttattctcggactcatcataggttatttagaaatgtattacctaatttccaagattttctagttaactttgtgataccagttttgagtttaagaccactttggtcaaataatatacactagagtttgttgtctgtggaaggtatccgagtgaccggcggcaaatctgtacaggtctgcagcaacctcagttcttacctcctccgaagaaagaatttgactgagggatgtaaggcagaaaaagagacccaggcaagtttcagagcaggagtggaagtttatttaaaaaggcttttagagcgggaaagaaatgaaagcacacttggaagagacccaagcgggcaccgagatcgagtgccccatttatccttgatcctaagactttctgggccagcccctttcccatgattctccccttaggctgggctgcccgtgtgcacagtgcgcacctttcccttgggatgtgaggatgcgccgtgtgcttaggaagttgtacgcatccccatctgagactttcgtcccttttctgttgggggaacgtgaggatgccctgtgtgcttaggaaattgtatgcatccccatctgaggcttcccttttctgttgggggaacgtgaggatgcaccgtgtgcctaggaagttgtaggcatccccatctgaggctttcgtcccttttctgttgggggaacgtgaggatgccctgtgtgcttaggaaattgtatgcatccccatctgaggctttcttcccttttctggtggggtccccctaaaggtcacattctaccattttgtctcttaatgcacaaagttgcttctcctggcacctgccttcaattaacactttagtgcagcaggtgtggaccatcaggaaacgccctctccctggcactggctcccaaggtgccacttttagagagacagtgcaaatatgccgagccatcacccgacattcccaatgggtgggggagcctctcctgccctgctcatgcctgtctaactacctgtaacagcttcgattatttgaaatgttgtatatcctagcattttggtaaattttccatgtgcacgtgaagagaaagtgtgctttgtagttgttattgcagagttctgatcatgttttgaaaattgtgtttttcagattttttatatccttattggctttttggctgcttatcacttactaggaaaattatgtgaaaatctcccatgatgatgtaaatttgaatttgtctatttttctttttgttctgtcaatttttgcttcctatgttttgaagctaaattagtaggtgcatagtaatatagaattgctatatcttcctagaaacagagcctctttgatcataatgaaatgcatctctttatttttagcagtgccttttgccttagatctacagttgtccctctatgtccatggggatgcggtccaggactcccccacggatacccaaatctgcagttgttcaagtcgctgatataaaatggaacagtagttgcatagaacctacacacatgctcctatatactttaaatcatctgtagattacttataatccatagtacaatgaaaatgcttataaatagctgttatattggttttttatttgtatttttaacttttattgttaattgctttttgttcaaatatttttgatccttggtggaacctgtggatatggaacccactgatacagaaggccaactgtgcttcctattaatatagctattccagtttccttttgcaaagttagtgtttacacgacacatacttctccatcttcttacttggaacttttggtgttcttatatttgagatacgtctcttgtaaaaggcatatgtttgatttcacttttatctttttatctagtttgactaaccttgtctttaaattggagtagtgtgtttacatttaatgtaatttgggtataaattgagtatcttactctttgttttctacctatttggtgagaacaggggagtgagagaggaggggaaggccatggagggtgattgatgggcaggtccttgcacacaccctctggaagacaggcacactgaggcactgtcccacatgctgagggacccccacatactgaaggacctgggtgtttttctgccaactcctgtccctcattgttgaggctcctcctggtgtgtgaaccacctgatgcttctgtcccatccacaggaaggcggggaacaccccccaggcagagagacctgggcagccaccgccatgaatgagagctctctggctgtccccaggccagctatgctctgacggccaagcgtggtggtccttgcctgtgtccgagcgtggggttagttctggaacatttgatcacttctcctgctccactctctgcactccacctggaactcccgattacacgtatgacccttttacatgttcctatgtttctcgtgtgatttctatgtttcgatcacgtcttccctgcttctgtgtgttttccactcatcttaaagttcattgatctgctttgctattaaactcacttatttcattattggtttatttttgatatgtaggtttgtgtttgattccttttatttgatggatttcggtttccttttgagactctctatcctgtgatctacttcctgccacattaatcctggttacctccacggcctgtctgagacgtccaaacctttatctcgtggatgtttaattatctggggttttcctcagcctttcctcattttgtcctttctctgggtgtgcctgataatttttttattaagtagtagatatgatgtaggaaatgtgtaaggatcatttgaggcccgggctggtgtcttcacctccagaggatttatttttgttggaagagcaggggtggttcatctgaatgcactccggggagggactgcatgaagtccgcctcagacctttgggcagctgatccagcttccgtttgtcccactcctggcaaagtccatgctcccttttcaggtccccactgaatgtctgggagtttcccaggcccttcctcccagtggtccttgaattccagattttatctccccaccctgtgcgttttcagaagctctcagcctccaagctccaagatgagctctctgctcatcggccaccagcagtgccctgaggggtagaaaggtgtcaagtttccagtggcctgtgaacgccacatctgcccaggacattggccctttgaggctagattgccttgtcacctccagaaaaccttcaaaaagtgtgtccagcttttctggttgttcttggccgtgggcttggatgtaaggtacacgagcaaacccactgcagccagagcaggaagctgtcccgcgtccacgtgcacagctctaaccctaaaatagccttcggagttaggggaagagcaatgtcctgttcactgcccaactccaagccctgtgtcccgggcagccacactcagccctttccctgcaagaggggacactcgctcttgataaaccagctttgcacattacctattggtgaagatgatcagtaactctgtgactgtagcacacacacaccgcacttcttcccgttctcccaagacctctggaaaacaattcttactataatattcttcagcataggcattaggactacatacatgcaattatgttttctgtcctcatacattttccttacaattaatatcatcttttttctttgcttaatttgaccaagaataagttcattcccaaactctcaccttatgcttagctctcctctcaatattcaaactcctagaaacctgttgttttgtctttcccatggacacggctcccaggcctctgacccctgctctaattgggacctgctgtgtggccctcccttgcttaccagctgacaggaacccttcctcacccccaggttggacacgccgtttccaaggcctcatggcttcctttttcttggttactgcctcgggctccctgggagagatctctttggtgccgaaaaccggaatgggaagcctcagcaccctggccccccatgcccctcgtggggcagggtgggtataccctgtacaccctcctggtttgggctgagggcattaggggtaccgggcgtctttggggtggcattagcccccgagttgctttggaaactgtcatactttcttctgtcttagaactcagaatccaagaaatggcatccatgggtataggcaaccagccattcatggatgtcaagcccagagaccggacccctgactgtgcagtgataagcgaccgggctcccaaatgtgcagtgatgagcgaccgagtccccgacagcatcgtcaagggcacaggtacggtggctcggtcccgccctcactcaccctgcagagggcactgggcctgtcatcaagggcatgggtacggtggcatcggccccaccctcactcgcccacagagtgcaccaggcctgtcgtcaaggacacgggtacggtggcctcggccccgccctcactcatcctgcagagggcactgggccagtggccgacatggtgggttggatgggcatgactgcagtggcaaagcctggtcggcctttcagacggctctgatcccattcccgaacctgggctgcacttctggagcggaagccagcctgacgtgctttctgtccctttccagagtcacaaatgagagggtccacagcggtgtcctcctctgaccacgccgcccccttcaagcgaccacactccaccatctcagacagcagcacctcctcttctagcagccagtcctcctccatcctggggtcgctgggcctgcttgtgtcctccagcccagcccacccgggcctatggagccctgcccacagcccctggtcatctgatatcagagcctgcgtcgaggaagatgagccagagccagaactagagacgggcacccaggctgcagtgtgtgagggggctcctgctgtgctgctgagccgcacacgccaggcctgatgactgtcagggtggcagtgcccatcatgtggctagaacaatacagagggagcagcacgccaggcctgatgactctgggggtggcggtgcccatcgcgtggctggaacgatccagagggaatagcacagcaggtgtccaggtatttcccaggattttagacattccctaacattttcaaacaaatttataattttgtcttatttaaaaaacaaaccttccacttccacccaagacaacagcataggaaacagacctaaaacaagacaaaaaaagactaaacatgaaacaaaagatgtcaagacacaagacatttggcaacaaaggaccgcgatccctgagagacaggaaaacgggaggtgagcccggtgatggcctcagacctccctccgccttgagagtttgcaggcctcagtgcagggaggggcccaggaagagcccagcagcctccgtgagttgaagagaccaagtcagcaggagttggcaggtcagagtgccagagagagatgcctgcatggggaaagactcaccagatcagcccctccagcacctagtgggttgctacccattcgcacactcaaacagggaggctaccaaggctgggagcaacctttgaaaagaccaaagatcaattcctggtactcatgtgggctggggacaggacccgttcccaccagccagactagggaaactctcaatagatcaattcctgatactcatgtgggctggggacaggacccactcccaccagccagactaggaaaactcccaatctgtgagcattaggtggagttctcagaaaatcttgcctcaggaatggggataattagccctagactgagccctgctcctgactcgcctacaaaatcataaaagcaagacctaaaatgatcaaaccattcccagataattcactttatcccagaacaaagctccagatgatctaggggttaccaaagtgtccacaccctgcaaggtaaactcacagtgcctgacctcggagtgccaggcgtgcagaggagcagccaagggcaaacactccaaggagagtcgcctggcaaagccaaccacccagagccagcgtctgtgctagaatcacagaattcaaactgtggctgaaatcgcagcccaggcgtccagaaagttaaagttaagaacctataatcccagcactttgggaggccgaggcaggcggatcacgaggtcaggagatcaagaccatcctggctaacatggtgaaaccccgcctactaaaaatacaaaaaattagccgggcatggtgttggccgcctgtagtcccagctacttgggaggctgaggcaggagaatggcatgaacccgggaggcggagtttgcagtgagctgagatcacgccactgcactccagcctgggcgacagagcaagactctgtctcacaaaaaaggttaagaaatgacttaatggaagagattcagaagacccagaccgaccttacagggatgagaaactacaatattgacagtggaaactatcctggatggggtaacagattggatttcacagaagagaccatgaggcaccttgaagacacatcagtggaaactatttgcatttgttgggcctccagagagacagaaccaataggagatagctagatatatatacagacagatagatagatagatagatcgatagatagatagatagatagatagatagatagatagactgacagacagatgagaggggccttaggggcattggctgacacaattttggcaggtcaagagccccacaataggccatccacaagctggagacccaaggaagctgctagtgtgcccagtccgagtcctaaagcctcagagccagggaagccagtggtgtaattctcagaggccaaaggcctgagaacctgggggccactggtataagtctgagtccatagacccagtgaactccaaacacaagagatacgagtgcacatcataatcaaattgcatataaccagtgataaacagaaaatcctaaaaccagtcagaggacaagggcatgttctgttgggaggcacaaagctgatgaggatggctgactcctcaggagcagcatgggtgagaggcagtggaatgtactaaggagaaaactgccaaattcacattctgtacctgacaaaatctttccgaagcgatggtgacataaagacattttcatacacacagaaactaagagtttcatccccagcagacctgcactacaagaaatgttaaatgatgtgcttcagggaaaagaaaaatgaagagcatgtgcaccatccaggattttcctcgttatttaaatccctttagcccatctcccatttgccccaaggaatgagtgctggcagtgagctgcactttttttttctctaaacgggaaatgggttaaaagatgagtggcttggccgggtgcggtggctcatgtctctaatcccagcactttgggaggctgaggccagaggatcacttgacttgagcccaggaactggggggtcatgctgggaaacatggcaagaccgcatctctattaaaaataaataaaagttaactgactgtttaaacaaaagtattaacgtatctgcggtttgtactatacgcacaggtaaactgtgtgaccacagcagcgtgatggctgggagacgctggatgtgatacgtgaagtgaggggtatcacttgaaggtagattgtggtaagctaaagatgtactgataaacccttgaaacacccactaacaaagaattacagctaatagaccaacagaggagataaaatggaatttttaaaaatccagtccaaaaatacgtagagaaagagggaaagggaagaatggacttgggggcgacacagaagacaagtggagagagactgaagcagccactggccatcacagcaaacacaagcagggcgcaggacgccggcaagccacagacaggcctgctctctgaattggtgaccacatgagtaacttcacgggtctgttctatgtccagagttgtcaaactgcatgctttaaagatgtgcagtggatcgtatgtcgcttaaatcccaacaaagcagtatttttttaaagtacaatcatgcacacagcacttcccctgggaggcaggggctgtgcccacagaagtcgttacctctgcgtcctgagtatggacagccaccatcacacagccccagaggccgcccaggctctagccacactctggcactgcctgggacaggtgccctcaggaacccaaatgccactgcccccgtgaaagccacttcaagcgtgttgcttcaaatcagaaggcatctacgcctgtggaagaggaggctgctgggggcccaggtgtgcagggggcagggccaggtgcaggggcacagcttatgcctgtggccaacccactggggagcaaggctggggatatgcccaggccagcagggccagcaggagtgactgcgccatcctgaacacgtccttgggcctcccaggaccttggtgcctcccatctgggctggcacaagcctccagtcaaaagatgggtctctctctcctgatagcatggagcctggatgtgggaatggagccacaccagccccacgggagccccacgacccatcgggctgtgggatgcatccccacggccgggacccctcagcctgtgacttggtctgggcagatgcaaaggccaccctgcagggctgaggtgtctgtggggaaggaggtgcccagccctgggaggccatcttgctcctgctttttatttaacccatggggctctttggcctcattttctgttttttgagtttctcgtgcactccaaactgtcctggagccagccctggtgtgaaacagaggcttcctgctggcagaagaggcccaccgagttacgtccacaccagctggccctgggcacctctctctctggccttctgtccacactgggatttggctctgatttccagaaggcagggttaggaaacacctgtttccaggcagagtaatgcttctgtctgaatcaggcctcatgggcttcaccagcagacacgaaggtttcatttagatggcgaacacgtgttctcatttctccagggttctggacccgtgagctgaagcaggtgctgagaagtgggagaggcggccactgggtccctcagggtcactcaccccgccacgtgaggccacttccgcccagcactgggggcgctgggagctgaggggcccacaggggacgtgggagacagccccgatgcgtccccatccgcagtgacgctagcgcggagtcgtcgccaagcacgtggagggacagccctggagccctggcctggcccagcatctcccagagtcacttcctgatgcctccccagccctgcccaggaagggtttgtggccacagccccacagcggccccctcgcctcgaccaccagtgcctccttccaagctgcctgagcaatcctgggtggtgagctccaccactcccacccacgcctcagcactgggaccccccagggatggtgtggggattcctgccccccgtccatgcctcagcactgggagctgggaaggtgtgtgatttcctcccccacctcagtactgggacccccaggaagggtgtgtggccccaccatcctgaatgctcagggctggtggtcagcgaggtggtttctaaaccaagccctgggaggagccatcctgggactgtgcttggacaaggttggggctcccgcagtgagctctagccctccccaggaccctcccacggccccagggtgccggccttcagattgaccccattcgtggatgagtctacaaggctccccagtgcccagcaagagtgtttttacattcagaggtgaggaaggggtgccggcatctgccccagacacaaccgggcaggtacagatgtcatccccttgaggacagcagggaggcgactcaggagaggctgatcagacgggagccgcatccccatcaccttccagagagacctcttcttttgccaggtgtcgtgagggctgtggcttagctgggcctgcgtccatccccggttctggggagatgcccgggcccctcctggatggcagcagcagtggaggtttgggttttgagggagccctaagaacctgagagacttagatggagcatggcacgccctggagagtccacgtccccagacccctcatgccaacaccattccacccagcagtttcttccctgtggtcagaacaaaacccccaagcctcaggcctcaggctggttttctgacaggcaaaatgctccttacataaggaaagacctttccttggctgaccctaaagtagccaaggggagctcacatcgcctggcctgccgccaccaccaggctgcctgaccagctcaccgccttgttctagatgcttctgaagcaacagctcgcctggccccacccccatcaagcatctgctgggcagcctccctccccggcccgcctgtagctcccaaaggtctcaagcctcaacatcctggtaaccaagtgcacccagagggctggcagggtcacatggaggcaggggacccttggccccagggtggtcgtcttcccaggaggtccgcctgtcaggtcagagggcagcaggaggccaccccacctccccgggttccctcgagcattcctttgtcaggagcagctcccccaggatccaggcatccctggcccccctttgcccccgccctgctctcaggagccccctgccaggtgctctgaccacaggaaacaggagccctcagggccactgccagaggacggattctgctgccaaccagaggtcctggggctggcggcgctggtgtgcctgccctgggccttcagcagcccccataaggagaaagctccagcctcccgttcagagaaggctccatcctggggacacgcctctcccaaggtcacccacgtgggggctttgttactcatgcttcccagactgcgtgctgtgtcagagttttcacacctgcctgatgtcctgggggggctcacagaggaccgaccctgcagggagatgctgacccaccctgagacccaggagaagaaaacggccagggtccaggctgctcccaccatccctgggggattagcaccttggctgagcccgaactgaccacctggggcgtaggtccaagatttaattacaaaacgataggtgaatgtgggttctgtgtgcctgtgacatagagaatgttttccacaccgcgtgtgaaatgacgagagcttttgtgtcacacatgtagctgctacgagacagacgctcttgttccggatcagagcagcagacagaaccggcacttttagggtccaaaccctgttgcccacagaacgcccatgacaccagctgggtggagctgccgccgagtccacgccccgtctggctgggacctggagctcccctcaagctgcagatccactctgcaccacaaggtggcctcgcagaggagcctcccgagctttggaaccagaggcaggctcagcgatgctctccatccggcctggccccaccgtgtgtatcaggtgtcagaggccttgctgggtgccaggccacgtctgtgctgtcacagctttgaggggccagcgggtcctagggagaggcccgtgcgacgtgagtaacagcagtttttcttctgacagctgggatggaggtgggtcctccagggagtgccccagtcctcgagagccagacttgtgcacgggcctggaaatgaaggtctcaggcaggggctgcgcacaccgatggtcagcattgccgttcggggcctgcagtcgcccataatgggccctgccccctaggcctggcctcttttgctttcctcctggatggttcctctacccctggtccagcagggactcagcagtgcctgccagctgcagacccccatgctcctgcagcctggaaccctcctgccctccaaaggtcatggggtgacccagggtgggaacaccagaccccctcaccccgtgtccaccgcccatggccgggctcacagtgtctcagagccgtggtgagccatcctaggaccagtgtacctcacaacctttcagaccagtgaaggccagtgggctgggtggtccaggcatgtccccaacgcaggtccagccatctctgcacagaactggaatctcggttcatttcggtttcagcaggtcccatgtagttagcaggacagcacttgagttaggtctgagaaagaacgcctgtttgtcatggcatttcctgtaaggagcccagagccgtggccccaggttgggacggcggcgccagagctgggcctgagtctgacccaacctgtgctgagtggtcctgctggaatgggaaccccaagaggaccacccctctctaaaagaagggaaaacagtaagcgagagggaggctgcaggggcccagaccttggctgaccttcctagccatggtctccaccctccgagacccaggggccccgcagtgacagcagggtgttgggccacacagagcccgagtaggtaaaggaaggttctggaaaccacttttcagaacccaaaaggtgtctgggaaatggcgttacctgccactgttgttaagtgtttactttgtatcaatactgaattgttaaaaattttaatcataaaaaccaatggaacatgtttttc

SEQ ID NO: 17 - DNA, 14796 bp, Homo sapiens
  DNA (1)..(14796): RCN1
gacgtggctccgcggccccggcttcccccggcagctcagcgaccaatgggcgcgcgagcggggccgcccgcagcttcccagcccgaggcccaggcgcgcccctctgctccggctcggggcgggcactggcggagggactggccagtcccctcctccgcgccggccccaaccctgtcgctgccgccgcgctccgagtccccattcccgagctgccgctgttgtcgctcgctcagcgtctccctctcggccgccctctcctcgggacgatggcgcgcggtggccgcggccgccgcctggggttagccctggggctgctgctggcgctggtgctggcgccgcgggttctgcgggccaagcccacggtgcgcaaagagcgcgtggtgcggcccgactcggagctgggcgagcggccccctgaggacaaccagagcttccagtacgaccacgaggccttcctgggcaaggaggactccaagaccttcgaccagctcaccccggacgagagcaaggagaggctagggtgaggccgcggccagggccccgtggggggcggcgcaggtgtccgagggccgcctgggcgagagccacgcgggataccaccgccaaagcgaaagcgaaatcgcgcgcgcggcctcgaggatggggccctgcccaactcggcgctggggctcaggctaacttgctggagggccccgggaccccagcttggagatcgccgccgccgcgccccggccggggtggtttctcgcggggaggcgagaacgtggcagcggccgcgggagccaggacggcgagggcccgccccctcccccaggttgcatcagaagggaggggagagtgcacaaaagaagagtttgtccacagtggcctgttagtgccatgagttcctccccactctctcgcagtttctctctgatcccccactcccggggagaagggcttgagacactcgctaagaaaatctcagggatgaacataaatggataaaagatgaaggggcaggcgagcgacaggcttgcttcctggtctcggccgcagtggtcttgccttttgcctaatcgccctgtaaatctatcgtaaggagtctgggcgcggtgactcacgcctgtaatcccagcactttgggaggccgaggcggggggaggggtggggagatcacctgaggtcaggagttcgagaccagcctgaccaaacggcgaaatcccgtctctactaaaaatacaaaaattagccgggcgtcgtggcacacgcctgtaatcccagctacttgggaggctgaggcaggggaatcgcttgaacccgggaggcggaggtagcagtgggccgagattgcgccactgcactccagccggggctagagtgagactccatctcaaaaataataaaaataaaaataaaataaaatctagtgtagggatacaaaaatccggttgaaaagggacacgcagtttccgattggaaacacgagggagcaggaatggaaacggttcgcctgaaacgtttctgttggcagcagatgtctgcagaagcactcagttctttggcaactgatttgtttggggggcaaaaagctggagggttctcttggtggtggaggattttgacttgggctgttaaaggcagttgagtcaggaaccaaacccgggaaacaaaacttcggcgcattttagtacaccctccccgggtcccctgaggaaacacttgggcactgtgcggaggtatctggtggtccttgcacagaggacccagcaggcagcctggtcccagatggaggcagggctggggaagaaaccagcagtcctgcctattgggcaccaggtctcagatctccctgaacctgattcctgggggtggaggatcttcatgttctgccacatgaaagagaacacagccatccctgtgctcctgggggcctccaaaggccaaagtgtttcattggaatatgaggataaattatacctattgtgtaggtgcaccatttgcctgctctgataaaaagacctttgaacttcaaagtcacctccaaacaattaccttttatcttgcagagtactttctcttctcagttaggacttaacaataggggccattgatgagttcagtctattgtattgctttgaggcacttggagactgatttatcctggagccctgagtggcagccacattgtcactggagaggaggcagggagaggttttgggatttggaaaactttataaggtgtggtcatgcagcttccagttaatgccttcattgtgacagttcagcctagtagtgagaaaaagtgacggtgaagttggtctggatttgatccttgtatcaacaccttgacttcattcatttattcatgcaacaaacatttgaatggctactgtgtaccaggccccagtttagataactggcaggtacaaagatgaaaccttatgctctgggcgtcgaagtgcttgtaagcaaatgtggaggagagaagcacagacaaactagccattatgcacaattgctgcaatgatggcctataaaacctactgtgagcacattcaggagaaggagccgccaaggctgcaggttagagagaggggattggggctgtcacctgatcagagtttgtaggatgacttggaggttgccaggtgtacagcaggggaaggccttcctgaagagaaaacagcccatttctaaagggtttgaaaagcgttctggggcatgaggggtggtgagtctgcaaaggggcagggaagggaagtgagaggtgagaatggaggggaaaccaagggcagagcaggaaggaccttggtgagatggacatgagatgttatcctgtacattgtcaaaatgtcataatccccaaaactcattgggaaagtcaggctggcaggagggcagtacacagagaacataatcaaggcacagactagaccagtggcagggagaggaggtgaatgccaaaggggcttggtctctccggattccaggaggggatgaatctagacaccagtgggaggcagaactggcagctcttgctcttgactcaatgagggggagaagagagaggtaggaatcaaggggacatccgggtctctggccttagccaccagatgggtgatggatgcaccattcacttgtaggttaaatgtggggtagaggcggggtaggaggtgctggaaattatgggtcctgtttgggatggggctgagtgtgagaagctgcccctctgtccaaagcttctgtttcagtggtcccctccaagattgggctgaggaggaatgagtgtggctggatctaggcaactttgtcaccatcacctgtcagtcctgaaaatgtgacagctctaaggcccctaaagacacctggaccagaggttgcaaagtgggaacccgtaggctgcatgcattcataaatatgcgacacagtgtaaattacttgcccacgtttaaagtttgaatggtttcacatacagacccccatatctggcttctcttgacacctttattcccatgtgtcagtcatcgtctgcagcagagtcggccagccctatttggcggctagcagggtacctccaagtggccataggtcccatcaaaaggttttgctcattctgttacctgttggtgttgagaacaaatgatgatggagttggtctgggtttgctccttgcatcaacaccttaacttcattcatttattcatgcaacaaacacccgaatggctactgtgtagcagctaccatcagccactgatctagattattgtctttagtgaggaaaagcatgcattctctcctttattcctcacaacattccttgtgaagtaggtgttcagtttacagatggggaaactcagagagtcaagacacttgcccaagatcacgcagataatggggaccagaggcaggacggggatccaggtgttctgatgaaagtgctaggcttcatctccatcctagctgcctttcccaggatctcccttgacattgttaaagagaaggttaagatcttatttattcttacaacaaatatttattgagtccctaatatttgtcaggctgagctatgtcctagatgtttatttggcatagattagatgctgtcctttccacaaaagaggattgtagagtctgatgtcattaccctgagattatgtttcccagttggcgttgggtaacccactggcatgtctccactgtgtccccaggatcagagcagtgcttggcacataactgggctcaacactgcacaatgttaaaagaattctgctgtgtctggctatgatttcctgggggaagaagcctgaagacacttgaagtttcatgttttagtctttttttttttttttaaagacagggtcttgatttgttgcccaggcttgtttacagtggtacagtcatagctcacactgcagcctcgacctcctgggctcaggcaatcctcccacctcagcctcctgagtagctggagctacaggcatgcatcaccattcctggctaatttttttattttgagacggagtcttgccctgtcgcccaggctggagtgcagtggcgtgatctcggctcactgcaagctcagcttcccaggttcacgccattctcctgcttcagcctcccgagtagctgggactacaggcacccgccaccacacctggctaatttttttgtatttttagtagagacggggtttcaccgtgttagccaggatggtctggatctcctgacctcatgatccacctgcctcggcctcccaaagttctgggaccacaggcgtgagccaccatgcccggccattcctggctaatttttaaattttttgtagagtcaggatctcactatgttgcccaggctactctcaaactcttggcctcctacctcagtcctcccacctcagcctcctgaagcactgggatcacagatccagcctatcttttaggattgagacctgttaaacttgcaaatgaaggggtactttcaagctgttggtgatgtttacaccttcctgagaaagaggagcttgggttcttgggttcaggtaggaggtggagacattgattattcactcctccccttctcgtgtacaccctcccccacctaaaaaaaagttataggagattttctctgtcaaactatcaaactgatgaatttgtttcccattttttattaattaaagattaattgccactcagaatgtctgttgacaagaaagttttaccactgaagctgttagaattccagcccaaaacaaagaaagaaatctagagttagcctgtatgacctcctcccagataaatggactacaagggtgaaacttttttaaacactggggatagcttggaggtgtttttgaagttccccactgggatgctgtcctggtttgggaccatctggtctagagatgacaaaagtgggttcccagcctgaagtttgctctgggctagcatttagggtacctcagtggagttcagtgggaaatttgtgaaacctaggccagctgtggagctggtataggagtctttaccctaagagcagagggtttaaggttcctagagcggatcagctggtcaagttttgtgaatagattctatgatgtcaaggctccttcagccctgacatttgtgctgtgtccaccatctggtgtcttcttgctttacgtttcaagtctttgtatccatggtggtgggatttaaaaaaaaaaatcacttatcttttgatttacatacagtttccactttttgccttggacctaagccagaagacatgagttctcaccccagttttaccaaatactggctgtgtaatcttagaagttattccatttctctgggcctcagtttccgttactccaaaatgagggtgctggactacagcagggaagattaataggtttcatcttacagatcagctctgatccgttgataatggccatcaccagagcacagtgctgagaattctgagagcacctctaggtttatcaggacagaggggcacgatccattagcagtgtctgccatcagcactggttgggggaaagcacatcaaccttggaaggataaacttgaagattccttccagcctccttggatcattgattctgttgtagttgtatgtgcattttggattgtgcaggtgtttgatcttttgctggaccagcatcacacaagccttgataatataacagccttgtgcctgtgtgtgggtttctttttttttttttttgtactgcaggaagattgttgatcgaatcgacaatgatggggatggctttgtcactactgaggagctgaaaacctggatcaaacgggtgcagaaaagatacatctttgataatgtcgccaaagtctggaaggattatgatagggacaaggatgataaaatttcctgggaagaatacaaacaagccacctatggttactacctaggtaagaggtgctgcaggagcgatgacacagtgggggcccagatcacaagctttttgtagactctctcttctcttatcatatccactcccttcagggagatgtcacagcctcctaagtagaacctgcttgtataacaccctcctctgtaaactcagaatgtactgagttgcttacactgaatgaagttacaggtgggagggaagggctgtgagggctaataaaaaaaatcccttagattgagaccccatctcaacttcgtctcagatgcacacacggagaagaaagcagaaaggaagtgtgtctgtggtatattttcaaaatgctgcctaattctggatagcaaggattgagtgggccggagcagtcagggaaggcttcctggtgtgggtggtttggaaactggagccttggagaatggatttatatttggagaaggtgggtcaactggaggggcaaagatgcagcaatgcatgcagtaatgggaagggtttagatccaagacaaacaagatcgggagaaggaaggagaaatgagattacagaggcacggggtgcagacctgctgggtgcatggtgaggttggcaaagaaacaggcccaaggagaaccaaagatgcactcacgcggccagaatcggggagatcttgaaagccaggcacggcgttgagacaagatgttttgggtaccaaagagcctctgtatgttccagatctaagaatgagatgatgaaagtagagttctgcaaagagaagtatggcagtaatatagtctaaagcctgcgctcttaaccacttgcagtaattcccctaatatgccatgaggcctagattatggggtggcttgaagggactgatattagaggcattctgacatagaatgttttaaagaactcagtaggtcgggaccttttttccctatatgtaccatttgagcatgcaggatgagtgatctggcaggaaacgcctttcttgaccgcacggtttaaaaacatttctgcatacatacatcctgcaggaaaccccgcagagtttcatgattcttcagatcatcacacctttaaaaagatgctgccacgtgatgagagaagattcaaagctgcagacctcaatggtgacctgacagctactcgggaggagttcactgcctttctgcatcctgaagagtttgaacatatgaaggaaattgtggttttggtaagataagtgaagagtctgggctgggaagagaccagggagaaaactgcctccaaatcttgtctcttccaaagagagaagatttttcagcctgaagggaattggagaaggactctgaagtagagtttgttggaatccccgtctacccagaaaattagtcaggtcaggctggctgctgtaacagatagcccccagttgtagccatttaacactagcaaagcttgttccagccagatggacctcctgggctgttctctgagcacagttgggtacccagttctcctctaagcactcctgcttgtgctctgccatcttgtagcttcaaagtcatcctggcaacacccagctggctgacaaaggaaaagagagggaatgagaagatacagtctttgtttactcttccggccagggaatgacacatccccttcacgtatgttccactggtccctcctagatatgaagaggctgggaaatacagtttagatacgtgcctagaaagagtaaatggggcccaggcacagtggctcacgcctgtaatcccagcactttgggaggccgaggcaggcggatcatgaggtcaggagtttgaaaccagcctggccaatatgttgaaatgctgtctctactaaagatacaaaaaaaattagccaggcatggtggcatgtgcctgtaatcccagctacttgggaggctgaggcaggagaatcgcttaaacccaggaggcggaggttgcagtgagccgagatcgtgccattgcactccagcctgggcgacagggtgagactccttctcaaaaaaaaaaaaaagaaagagcaaatggcttaagtgagcaactagctagtctctgccccatttttcaattttaagggacttggaaaaagactcagaaatggaatgaattggattgttaaaactgtatggaaatgtaaagtaaaaattatggctggaagagatgctacccttagcgggtgggtctttggagggtgggtggatcaggccctaggctttgaggaatgactatgcttgtaaggcctcagaatgtagttgctttccgtagtgtcttgttgggtcccaaatgtcttcattttccatgacaattaaataaatgccatcacctgttttcctgggcagatgcaccaacccagttccaactgtttcaatcctgggaaacagatggctagagcttttgtttacacgagctgtggatggttttagttatccaggtggtggaagggtccactcatgcttcatcctcctgactgccatgactgtaaggactgggcagtggctccaagaatcatttctctttaccactcaacattcatgtagtgttagctaatgtggcagaggacagtgcaggtggtgaatgatcccgagtagactacgagcctttgggagtggctctctgctctcaggttggctctttggtttgacccaggatgcctctgagttgctgtgccaatgaacagtaaactcatttaattattgacccaatcaaaaaatactgaataagaggtcaagtatactaaatacagagcacaatacatcaaaaagtcagatatacttttattttttagttgcccactgtttcacatttctcttgacaccaactcagtattcatagtcctgttagcactagagtctattcttgtggtcatctaatccagtggttctcacactgggtttctcgcatgttccccagtgggtgttttggctggatggtggagttagttggcctggcagggcctcctgatatcgtcagagcacctctggggttacaggtacatcttgcttgctttgaagaaagcattctgctctggaaactggggtgggggattaggaacagaaactattgcctgttttttacagataaaaaactagttcccagggaagtaaggcgatgagccagaagtcaccaagcattcagccgtaaaagctggacaaatgaggacaatagaattctcagacttcttagagcacatggccatcttgcattctgttttaccttttgcttcctaggaaaccctggaggacatcgacaagaacggggatgggtttgtggatcaggatgagtatattggtgagtactgacctagagtcttgctcagctgtcctgactgggccacatgaccccacccacacgtctggctactttccccagacgtctcttttagcaacagctgcaagtctatacgtcactcctgggagcttccagcctgcttgtcccatcagccctagtgatgtagtatcagggaagtattattaggcctcattcagtggagaagagatgaaaaggctggccctacacaaggctggccaacagttggccccatgactctgagaggtgcccttcatcacactgcctagttttacctttgcaaaaggacattggagatcccatagatttacagtgaagatagaggagacagtgtcagggcaaagcctctaaaactggactgggtcaatggagcctagaaactctgagtagatgcagctgtgattaacagaactgtttatgtgtctgagcactttgcagaaaggcattcttcttagaaagataaatgctttacagagtgcacaattgcccaataatatgctcattttgtgcccctcgtttcccatcctttggatgggagtcctatagtgtcaaattaatgtatttgggtctgaacccaccattgctggttagagcccttcctggtagccccaaatcccccccagcccaaccccccgctagaaaggactagagcaggcaacaaggacaattccatttgatcctcaccacctgctatggcacatggctccagctgcaggctcccttctcatggcagctcttttcccaagtctcaataaagtaaaagctggaaaatcatttggtttaggtgttgacctatgaaaagagaaatgaaatatgtataatttttgtacagatttttaatcaaagccattaattacctttaaatgtaaaactcagagcctgagttgctgtctctggttttgtggttgtattactttgccatcccagacacgagaacaagtgccttcagcaatgaagagcagactttcctctaatcattagaaattatgtttgatcatgagccaaacactgttccttgtgtgtcattggtaacagacaaggtagctctcgccacagtaattaaagtgatcttggtggcactaccctgatagaataacatatgctgacagctccctcatcagagcaagcagttgagccttcctcttgctgggtccacgtgcgagggtcacgttcggaggcgcagacctcttactgtggcactggggatgaaatgagactgacagcaaagactgcatgatcaaaacaaacaatgtagtgcttttgattgaaagtgtgcgctctgcccagccctccggaactgtgcattgaaatggtgcaaagtcagaggcagaactcttcgagtggctttgcctaaaagaagcatcccattctttacagtgaatagggagagggaggtggaggcgttgcgcttgaaaatcgaatacctagtgactcacaggcagaggaaacccaatgtattgactcgtcatttcacttctcggggaggcttctcttcaagcggcaccaagtggaaagtgtgtggtggggggtggtagtaggaagagcactggaattaggaaccctaccttcaccaattagctgtgtgaccctggggtaatcatgtaatggcttcaaacctcagcttcctcatctgtaaaatgggggaaaaaaagtgagcccatttttacaggattcgatgaagctcgaattagctaatacatattacaactctttctcaaaaacaatgtagacatgtcagttaggggtctaccttgtagtcaagggtcttgtctttttttttccttcacttactacctgcttcattcaccacctgacatttccaagctctgcttccgtgacagagaaactgcctgcagggtatctctcttttccaagagctactgacacacacacaatgcaaaaacgtttcctttttcttttccttgccattttgtacaatggggataatgacccatcttgtagaattgttataaggatgaaatataatgacaagtgaaagccctttggaaatgatataaacaatagtactaaacacagtggctaagactctgggttgaaagcagagtgaccatgttcctgtgcagcctccagctcatatgagctgtgggtcattgggtaagactttacctcattgttttcatctgtaaaatgggaattataacagcactcactttgtaaggctgttatgtgaaaatcaaatgaaaactgtgtgtagaacactttatacagtatctggaccatagtgttcaatgttagtcattattattagttttcgcttatgtagtgccagtttgggttgtagagggcttttacatcaaaatggcacatttgatcataatagccccatgatttataaattatcatctccattttacagacaaggaaacttcaggctcagtcactgaactaagtcaaaagccgggatttatcttttggcttctaaactcagttctttctactccaccacatggccttcatcatgaataaattactgcatcattatccccaagaagctgcctaccagctgtttgagttaggtctctggattggttgtcgcctttcctaaagctcaggaggtcaagtttgttttatgggggtgggggaggtttaccttcccactttcctttgtaaccaacaataaccttcccttctagcggatatgttttcccatgaggagaatggccctgagccagactgggttttatcagaacgggagcagtttaacgaattccgggatctgaacaaggacgggaagttagacaaagatgagattcgccactggatcctccctcaagattatgatcatgcacaggctgaggccaggcatctggtatatgaatcagacaaaaacaaggtatttcccattcttctggaatcactgattgaagggagacagtttacataagatcggttttgtttgctttttcggcgatagcattgacccatgtggccatgtctttattgacttttccttcttgtcctacagtggagacctgtaaacttgagctaataccgtgataacccacagtaaaattattaggccccaactttcctggaaagtcagctgtgagccacagacttacattaagtcacatttcctaagattgcagaactttgtgggcaggacacgatttaagaagtataccccgtgttgccctaggatcagcttatttatccattcattgtcaccaaatacttatcaaacatctgtgaggtgtcaggaacaaggaagcccatcccattaaagcccagacatcctcaggcaagctcaggtttctggctttaatgcctagtacttcggtatctattgataaacatccaaataaacaaatcaatacatttagaaaaatgtcctgcctattccccactttgctgattgcccccaaattctcaggttatgccaacagtcagtttaggcagcgaggctgtaagaggaaagtggcattcttgagggcctattttgggaagaccaacactgcttgtgggcacaaatggattctagcttctgaattactcggggacttccctgacacgttagcacggtttttatagcaagaggctgttccgatttggagttttgcaatgcagtcatggtagatgaaggaggtgcccagtagcttctggattactaaatatagtattttaaatgttgtacatcagtgaaatgacatgaacatcatacagaactagtacagttaccagagcttccatgacagtgctctttgatctcttctataggatgagaagctaactaaagaggaaatattggagaactggaacatgtttgtcggaagccaagctaccaattacggggaagatctcacaaaaaatcatgatgagctttgatagacactcaccagaatatggcagactgtcataggcattctgttattgtcttggattgttgctacaattgtctaatttacagcagttgtgatcccacaaaaagcaagtttatacctcagattggggtataaaaattgtttttcgctcagtatttactggaaaatggacatcactagtctttcagtaagatttctctcaaaacacgtgaaaaccttggtaaattgcaattctttctggggatatattggtacaacatgacttaaaacttttttttttctattaaaacttaaaggggaacaaaacttgaaaaagccctgttcttcagaaggtgagtgggttgagggaggcagtaatatgaagtgactgctgtgtattttaactaccagattttttatatttgccactgttaaatagttggaaaggggaaattctgattaagcgaaagtggtatcatcctaggtaagcttatttcagaacaagtctaatatttcagattctttcttttcgactttatactctgagttattacttactgtaagtggtgtatatgaaacctccatgcattttccagtatggatctgctaatatgcacagtaaatccatgtctttgtttgtttttctattaaaaagcaatcaagaaagataatgtgaaaaagaaaggaatttagaggtagggaaaagatgaatgtcagacatttgaagaactatagtaaaatgataaacactaaatatacttgagaaaactttcttaatatgccaatgaggtaggcctgatctttgaaatagtgaataggaatacaatgcatttcctcagtgatcactgattagaatgagttggtgggatccttgggaagccaaacggagcggagttctggatcatgtcccatccagtccagtgaatccacgacccgcagacctgtccccccgcaacagcttataccatggaatgaggacaaggtgatactctgagctgtggactgaactggcagacacaacctgtacagattgaaatttcaccttgtaaggaggaagtgaatgaaataaaggatccccctaaggattttctactgtgtcctgtggtgtttgacttcacagatgctatttgtgacattattcatatagcataaaacagtggggttggatcccatgaataacattataaaggttctggggttttttttcatccaattactagaatgttcagaatagactcatatttactaatttaataaatgtatgtacttaatgccttta

SEQ ID NO: 18 - DNA, 118534 bp, Homo sapiens
  DNA (1)..(118534): SEMA5B
agttggagcgcgggggttggtgccagagcccagctccgccgagccgggcgggtcggcagcgcatccagcggctgctgggagcccgagcgcagcgggcgcgggcccgggtggggactgcaccggagcgctgagagctggaggccgttcctgcgcggccgccccattcccagaccggccgccagcccatctggttagctcccgccgctccgcgccgcccgggagtcgggagccgcggggaaccgggcacctgcacccgcctctgggaggtgagtcccgggagccccgggcgcttcccctgcgcgggttggggctgcaacttgcaaacttcagcaactcgggtgggtatcggggtagagaggtaggggtccgggctctggcaagttgaagccaggtaggtgaggctgcgggcgggaggacagggggtcccctggcttccgcgcctcccgctgccacctcggcttgagagccctcatcgctgctgcgttcccgccgccagccagcttgggtccgggttgcactgggccctgccagggctgtggtcggcgcatctgggctgcagcggcgatggggacccgggacccaggcctggagaaggagacggacgagtgaggctgagggacggagggacagaggtgcggagatggaggctcagagagggccggctagtaaacagcactgagggagagtgcgggcggcgaggcgcgtgggaacgcgtggcccgcccagagtgtgaaatctcccgctcagggacgtccctgctccaccgccgccgcctgcggagccgccgcccggattcttcccagacccgcctccaggacactcttgccctgaccaggcctgcggagcgtgaactctgcccaccaggctccaggggcagtggctcagggccccgcactcccggctgggagggtggagaggggtgcggcagctggaagcagggacgcgagcggcgatttcccgatttatgtttctcatggtaatttgtctttgtggttggggctgcccattcactttccgctcacgtcctgcgggagatccagcgaggagggagggagcggggggcgctcgggcacagagagggatgcagacgggagaggggatcggggacccgcgcggggcgggagccaagagggaagtggtcgccggaccggcggaggaagaaggcgaggctcgagaaaacccggcccaacggagccgactcctttgcccaccgcaaactttaaacaaggaggaggatcacctgcagcgccgttctggccccctcctccccgcccccgccccccacctcgagcccagtctttgggtagttccgactgcccgccgcgccaggcgggagtgggccgagagtctggatggggagagaggagcgctggattctgcccgcacccctgcgatcctgcccaggctttctgcagaggggcggggtgagagcagcaggagccgggagggcgggctaccctggcatgcactccttcccggccaacggaattgggactgagggtttggaagcttgcctgtgtctagacctcaccacgatcctaccttctctggccctaaccccatctttttccttcagcccctagtgaatccgacctccttccgcttttctcaggcaccccaacccacttcggcctcggggcctctctccacagccctccctgcctgcttgctcctcggcctccccacttcagctcatctttttaagcctgttctcttcttgacaatcagcagtggcctctcaccttttctaagccgggacagatgaccttgaggaaggggcaagaggggaacttgaaccttgtaactggacctcaagattacggaaaaggggggcagatttgaaagcagcttggaaagaaacagccagtacctttcccgaagtctagattttcaacggaggaggaaaggagataaaatataggagagatgggggaacttgccacttggtcactcatggggcggtgagaactgttctgggccttggggcgtgggggtagaccactcggggcagggctgcctctggcttgctgtgttgggaaaggtgtgtgtaggtgagtgtgggtttcagggggagctcttttctccatatcaacacctatcaccaccagtttgggaaggaatggcagatcttccatcccttttctttttccaagcagccagtgccagagccttcctcctccaaagccaacagtagcgaccataatcatcaccgtggacatctaacactgtttaagcacctactatgtgcaatgcaccatgctaaatgctggtagataaaaagaggtacagggccgagcccatgcccagagaggttagtaagttcaccagtttgatcctgagacacttgtctatgtgtttggggagggagaacatggagaggaacatgcagtggctgtacaggcagcaaggtgcctgatgacccaagggtttaggagaggaagggttaaaaaaaactcgatgactcaggtgggacagagagctgggcttattgactctgccctgagataggacagccagcacctcctttcccactagggaggggaaaaagttcctttaccacttctagtgccagactagaaaaccagagaagccgagaggtccagcccaacactgtagattgctacctccccattaggactggaggagccccagaaactttcttgtcttaggatgaacttcctggcttgtttgaaagaccctacagtggtcacttcttattgagactcaaagctgggagaggccctggagattgtccatgtcaggggaagcacaaattcaaatgcctacagagggcaggcaggtcacagtgtgttgatcaggcaattagagtggcccagcttatggacaattgggagttcaaagccaaactggccaagtgaaatgatcctaacaaaatcaattaacagcctttaagtagcctgaccccttatatctatagataaagatattaagattctaagaagtgagctcatctgccttggatatacatgttatcttgtctccctgtaccttggggattgactggaatatctcatggcctggttctacctctgacctgttgggcccttggctcaccctcattctcagggcccattaagattcttctgtcagatgataagttccttgagggagccatcttgttttactcaaatctgagcacatcacatccattgatataaggttccacatgcagagcaaagactggattcagatctcctgtccccattcccactgggaatccagtgggtgtaaaccaattttattttttacaaaaaagagaaaattcaaccataactttttgtttcatctaatgtagcaatagggttagatgagataagactagaagctcacattggatgtttgcagattccaaggaacatccagaaagccctgatgcctgagtggggatctaaaaagagggatgggaacccatcaaggggatagaggaacagcagacatttatggatggagtatgtgtatttaggaagatgatgctattgggtccaattatttgaacactgaccataacactcccgtgcttagtcttggtcaccctcttatatccaatgatctgagttagcaactcattaccagccaaccagttcaccactttcattgatgactgaggtggtagaatggacaaagaagacaaaaagacaagatccctgattagaagtgcatgccaccttgttatgttatattgccttaaagaacccagagctgagttctggtgccccaccacctataccctggcagtagacagatgtttcccatgatcttcaagtgttggctttgtcactgcctgggtacagggtaaaagagaccatccagtggcagtaaactcctgtgttcactcacctactatgtgccaggcactgttctaggagccatggatacaacagtaaacaacacatgcctctgatctcccaggatggggtaaatcagcatgactaagggtacacaattatcagcattgcctcaacatctgtggtgatttactgtggtgttttttcccctgtgggtttgtctgggggacctgacagctaatgtggagttgtccaaaggacttggagtccagggttttgggggagggtgagagggctaggatcccatcaccttagctgtttcctagttccaagttccctctctgtgcctcagattcctcactcatcaaagctaaacacctactttgtacctgtggtgtaaatagatgcaaagccaggctcctggagatctgggcatctggagctctggggatgcacaagtgcttggagggagtgttacttatacttaaagatctaaaccccagtgggttctggggaccatcttttgcctcattcagtcaccttgatcactagcttgtcttcatttcgtgtgtgtgtgtgtgtgtgtgtgtgtgtgtgtgtgctggaaatagttacttctaatgaatgagttttctttacattcagatctttccatatgagtttacctatcactaagttggccttaaatttatgacaacacttaactaacttggtcttaaatgtatggcaagaggccaaagcaaatgcctggactaatggaatttcattgaattgacagaattgagcccttcatttatagcttgtgtggacaacacctggatttttcactggcatcgtgctatacttttgcaaacccccctctctgtgacttttggtttgatgacatctgccttagctgaggagatgatcctctaatgggtaatctggaacaggatcttcgtgtatgccattctctatttcagatggatctcctccaatactctccttctgaagaaatttcctttataaccagcttgaatgctagaaaatggcagggagaagttccagctgagagtcgagttctgaaaggaaagggacagaagggtgctgaatgttgtgtggctctgccatgatacttcccttcccttctgttttagtgagcatgagagatgaaacccaaaccttgcagaatggcctctcagtcctgatttgagtgggggactcaccagtgagaaattattcgacttggtggcttcaaagtggaataaaaaatgaagatggttttctgtccaatttgctgctgggcacaggagagaaagcagaaggagggacctctgggatggggactgggtcaggagagtttaaccttgagctctcttcttggcagttggtctgctgattctcctccactctctgacttgaaatagaaggacaaggattccatcgggctttccctgagtacatgaaagctttaaaggcaatgctgtatgtgctgaatcccgccatgacactgtcctcattgttctgcgtttaataaggatgacttaatcagacttgcgcatggaacttgtttgaatttgaagccttgtcgatattatcagagtatctttcatttgaaccagaaatgtcctggccagcatcttctgtgatgggaaaggttggtacttgaaggatgtttagtgaccatctgtcctgccagtcccctgaggatcaaattacaggtttcagttacagagtggggaggctgggttagaaatgagggaggcttttctgcttgagcacctctgccaaaccactgggttcttcatctgtgaaagggaggtgttcagaagaatcttaaagccctttctggccctcaagtcagtggttttgaatggatattgcagtcgcttcttgattttccaggagtggctcgttgacttttctgtggattctttgtggggaatgtgagtctcaggatagtttccagttaccatccaacccccctgttgttaacccatctgaccgactgccagtcactgcatcttcagagaatgcattttcctttttgcctcagcctgagccaaatatcatctggaaggtaactctgctgtatattgaggcatacatgtgcatataaacatacatacatatatgcacatataaatgtagatgaaaggtattccaaatctgtgtgttaccggctgaccattggattaaccgcagttctgtccgcagtttcgttccctgccagagctgatgtaagcccgccctgggaggcaactttagggaaatggcttgcagggtaacaatttagatccatccctatttgccagtcccactggtctacctgagccatagctccctccctactgccctagccattgtccggaaggcctcccaagagcccccctgttaggaatacaaaagagctgcagttggctcttaattattcagggacaagtgtgtgaagcacccaactcaggcctcttctttccctgctttcggtgccttgagtaactctatatctgtagtgagtagctggggcagatcttatcatttcatacaaacttttgtttctagcagccagctccctctgcttctcttccctcaaggcgcctgggggaagctaggagccctctctgagaggcctcatccactcaaagcagactgcttttaaggtttacacattgccctgttggttggtgtgtatttctgcccgaaagcaggacagaagaggaaaataccactagctctggctgatgcagggtcagacccctgcagatttcccgggatccgggctttctttccttcctcctttggtagagcctggactttcagtgtttggcatcagggataccctaggtcccatcaggagtctaagtgtagagcagtgtccttgtggtaaaagctccaaacaggcaaggtctaaagagcacttacatgaatgtccccaaggctgagggtaatgtttctacatagaccaggtgccttggggcacatgctccctttcaacagctctccaggttccagagtgagactttcctcactttcctgctgggccctgtccagagagaagagggctgtgaagtggggtgaacagcctcaagtctacctctgtatacaggtaaccgtggcttggtccagctcaacacataattcactggcttccgtaaaaaccacctgcagagctttaaaaaatacagacttgaccagccctatcctagaccttaattaagataggatttctgcggggggagcctgggcactggtatttttttgagcttcgaataggcagccatggttgagagccactgacctaaatcttcttttctaggctctacctggcctcatgccaatggcatgcagaacctcttagccctcaacccttctaaacagccaggtcctttctaatgggcaccagctatagctcctggcatccagatcatagctactgtttgtgttctgaatttaatgactttctattataagctgattgtgagagctcctgtctggttacttccttttggtcatttttttcttaaaaagcatttacaaaagtaatgaatattaattcaacatttttgtatgtttcgtctagataggtatgtaaccaaattgtgattgtactttttgtaaccagccttttcacttaacagcatattgtgataatttcccccttcctaagtatcctactaagatgggctttataatggctgcctggtattccatcatacggatgcgccataatttatttaacaaaccccccgtggttggacatttaaattgtaaaccatttttcactattataaataatgctgcagtgaacatccttgcacattaatctttgtgcctatcaatgattatttcctcagaacagatttctagaagtggaatattgatgctttttcacatggaccatttagaccgtttttgactgacttcctacagcaataaaaagtttttggattcagagtttaagaaacacttttcactgctctcctctgaggcttcgcgctgactgcttccctgtccctgatttgaggtcagaatcccttgacctagccttggtcctaggctctgcctccagatcagttccacagaatgctgcctctcccttcataggaactcctaggctcccttgcccccacctccagcatccttgtttttcctttcacctgctcagccctttcatcttcgtacctccagcccctgaaccataacactcaatgccttccagctagtgttccgtaaaaacagctgtggtttatacagttgttactatacaacggcctggtaaactttttatgtgcattatctcttttaatcctcaggtgccttatgtacacatttaaaaaaagatttattaatttatttgagacaggatcttactctgtcacccaggccggagtgtaatggtgcaatcacagctcactgcaggctcaccctcccatgcttaagccatcctcccatctcaacctcccaagtagctgggaccaaatgcatgcatcaccatgcctgactaacttttgtgtttcatgtagagacggggtttctacccaggcttgtctcagactcctgggctcaagtgatctacctcccttggcctcccaaagtgctggaattacaagcatgagctactgtgcccggcccacatattatttttatctccactttcctcatgaggaaactgaaaccttgagaaataaaatgatttgcccaaggtcacacagctaataagtagtagacctgggatttaaacccagagcctacacatttaaccactacataggcttttctcaatcctcttggtgttaactcttggcttgttgtcaacaagttgttcacaaatattccctcagcatcccatggacatatgctgtgtctttctccagcagaagaggggcatttctcagtacaaatagcagtagagtggggatgctattcatcaatgcccccctttcctttttacttcctgggtcatgtcctcatccctttatccaggtaacccatgctagaaaacttttcttgctcctcactgaccagctgccaagattccagcatgccttgcagctgagcaggtccaagttatgacgtattcctattacagcttctccagccagttggaagaatttgggtgctactttcccagtatggaatataaggctgtcagggaggcatgctatagtcatgacaggggataggcagtctgacttctactggaaatcagatactgtttaaagtggagaattggatgttggggacagacctgatttggttgaggtcctgagaaaaagatctgaggggtttaattgtgcataggcttcatcagagccgacaaggtgatggggtggctcaaaacaacaccatcttaaatggagctaagagaaatgtggggtcccgattgggttcttcctggtcattctgtgcttatttatgaatatggatttgagaggggaccctgcccaactcaagtgtgcttcgtggagggcatctggtgtcaggaggaggttgggaagcctagccacaaaaggtctggtgaaagaagctcctctgttaagacagggagaaaacgctgagggtgactgtggtcaaccacaaaagaagcaggacttcctatggaaaaacatactcttcagctcgggagaaccagaagagcccagagtgaaaagtacaggaacctaggttttctagaatgagcatcttcccaacccgatgggtaaacagatgggtaaacagtaaactgtttcagcactggccagcagttctgctgcctggtttttgcaggactcctgccctgggaacagatggtcatccaaccagtgtacctctatgtctttgcggctctgaggctggaacaccacttcctttcctgatttctttagagcaggaattctcaaagcgaagcccctgactcgtggcattagtgccaccagaactcgttaagaatgcaacaattcttgggctgcaccccagacccactaaaaaggttcaaccaaccttttgctggtctggggtccagcaaaaaatccttttttttttttttctttttttgagatggagtctcactcactctgtcgcccaggctggagtgcagtgatgcagtcttggctcactgcaacctctgcctcccagtttcaagtgattctcctgcctcagcctcccaagtagctgggattacaggcacccgccactgcatctggctaatttttgtatttttagaagagatgaggtttcaccatattggccaggttggtcttgaactcctgacctcaagtgaaacacctgcctcgtcctcccaaaatgttgggattacaggtgtgagccactgcgcctggccaacctgtgctgttaaaagccctgcaggtcattctgttgcatgctacagttggagacactgctttagaccacattaggtcattctttctgttgctggatgcttgtggtgcttatttgaaactcacaacctgcaaccctttactagggaagcactagagaaccttggaatgagtatgggtttgaaaatgagacagacttggcttcaaacacagcgtggctgctttttggttgtgagttttgtataagttcctttccctttctgagcattcttttctttttttttttaactgtaagatgaggtagggctgtgtttaaaggaagattaaatgagctcattacttaataatcctagaaagtacagtcagccctctgtatctgtggaatccatgtgaggattcaaccaaacttggattgaaaatatttttaaaaaatgcatctgggccaggcgcgggggctcatgcctgtaatcccagcactttgggaggctgaggcgggcagatcagaggtcaggatatcaagaccatcctggctaacagtgaaaccccatctccactaaaaatacaaaaaattagccgggcgtggtggtgggtgcctgtagtcccagctactcaggaggctgaggcaggagaatggcgtgaacctgggaggtggagcttgcagtgagccgagatcgcgccactgcacttcagcctgggtgacaaagtgactgcgtctcaaaaaaaaaaaaaaaaaaaaatgcacctgaggccaggcacagtggctcacactggtaatcccagtgttttgggaggctgaagccagagaatcactttaggccaggattatgagactagccagaacaacagcaaggctctccctacctctacaaaaaaagggttttttaaattagccaggtatggtgttatgcacctgtagtcctggctgcttgggaggctgaggcaggaggattgcttgagcccaggagctcaaggctgcaatgaactgtgatagcatcactgcactctagcctgggtgacagaatgagatcctgtctctaaaaaaaattaaattaaattaaatttttaaatgtatctatgctaaacatgtacagagacttttttcttgtaattattccctaaacaacacagtataacaactatttacgtagtacttacgttgtattaggtgttacaagtaattaagtgatgatttaaagtatacaggaggatgtgtgtaggttataggcaaacactacaccattttatataaggaacttgaacatttgtgcatttgagaatttgcaggaggtcctgggactggtcccccaggtatacttagggatcactgcatcttcttaccgacatcacagttgcctttcctacagaatactgtcttcccagtgagttttccctgagcccctcaaagagaggtctgggtgtaggttcctctgtgtcccctcacagcacacaccaatgtggggctccctcaagttagggatcaattaaggcttgggctgccagctccctcactccctggacagtggagagtcagggcagctttccttcccacccctcatcctcctgggaccctattctgtgagcatgagcaggttcttccctccagtggacctgggtctcaccaaacctgatcttctgaggcctatgagtccctgtgtcagcacacagtttaatctgccgaagccatagatgaacagtcttgaggcccagacatcgcatggtggcctctaactttaaataggtaagaatctcaagttgctggtgtcaagccaggctgggaatgtgagtggaccctctttggagctgcaggttgcctgagtctttggcacaagtctctactgagtggtcagcaggtggagtcttgagtttctcagagacagagagctcaggtgcccatgagacggcccatttgatgttttgggtgacaatgcctaatataattattttatttctctgaagtctgtttctctccctgtgggttccatctcttctcgctgtggctgggtgttcatccctcttccatgccacagttcttcaaacattggaagttgatgagcctgccacctcttccccagttcagcagtcctcctctggcttgtctcttcatctctgggcataggactctgaagatctcccacttctctacagttgaggtctccaggaccaaagatggccctccaggtgaggcctgaccagcatacccgtatgcttagctagtgcatctcctgttaacatagcctcaactctgatctggctgtctttagcagccacacagcactgctgatttcgactgagcttacagccaaccagcaccccagggtctctttaacataacgcactcagccacatcttcccaattttacctttgtgtttgtattagttttctagggcagctgtaacaaaacaccccacactgaggggcttaacaacagaaacttattgtcttccagtcctggaggccagaagtctgagatcaaggtgtgggcagagctccttctgagggatatgacagaagatctgctccgtgcttccctcctggcttccggtggtttgctggcattctttggtgtttcttgttttatagaagcatcaatataatttctgccttcatctttgcaacatgttctccctgtgtgcgtgtgtgtcaccaaatttttcctttttataaggacaccagtcatattgggttggggcccaccctccagtgtgacttcatctaactacatctgcaacaatcctatttccaaataaggcaataatctgacatacagggggttaaaacttcaacctgtgagctttgtggggggacacggttcatcctacaacagtgctgcagctttttgacctcctgtttcgagactacatttttccctaatttattttatcttgaaaaaacctttccagctgatgaagatatttcggatcctgcctctgtcagccaacgtatgtgctattgctctcagcttcaagtgcttcttgtatattgatccaaggatttgctaagaggttgaatggggtggtgtgggttggagctctgcagcatggcccctggacacttccctgcaggcggccaggatccattgctaagcccccttggggtacaactgtgcaaccagctatatgtcccactaatgctactgccttccagcttcctctttctagcttatacacaatgatttcatgaagagcttgtcggatgtttcatttaagatctgcttgatgggcaaaccccatttcccttgtctaccaacatctcctgtcagtggaggagatgcgctttgcctgacaggactttgctaccaaacacacgctgtctactggtgatctcagctgcccttctcaaatgcccactagccttcgtttagagtctctgcaggaggcacattgagttcatctctgtggtttgcaaaacccacctcagacccctttctggtagtgaggactgtgtggcccactggaggcctcccagccgccctagtgcttgccaggatcctgtcaggattcccatgagatcaggaatctacagctgttctgagcctcatttgcatgttccctgttccctagatgtgtgtcccggccaagtggcttgaacacattcagagcagctggagcttctgtaggcctctcaccagcctccggcttggccctcctgtgcccaaagctcctctcaccgtttccttcctgtggaatggggaagacagaagccaagctggagacagctgtaggatgagccagagaagcctcccagatcgatgagcagcagccttgttccccgtcagcatcctttaccctccagctcccctcttccctgaagcctttccctctctcctttctattctggctctttgactccgtggggaaagcacataagtgaagatggggtgtgtgcttccagaggctggatgggaatgcgtgaatctggctagattgggagcagggaagagagctagatgtgagggcctcagacactctgctgaggagtggggcttggaagccagcttggagtgggaggaaaagccgggagccacacagactgggtctcaacacctgctttgccatttactgttagagtggcctttgggcaaattatttctcctctccaaggctcagtttcctcatatgtaaaatggccatcatacctacttcagaaggttgtcatgggaattgaatgacacaagttcctttctgtatagcaggtcacctggaaaagtacctgggacctcaaggtaccaagtgaaccggtccttttgcagagtggactagcgagctggagcccaggactcagcagtttgcagaagcgggcgggtgttgtgaggatttcctggtttcctgagagcttacactgtagcagcctgttttaaaagctgcatgtgttttagctcatgaaattcctcacagcacccccattttacagatggcatgactgagccaggctgagataggaaggtatgagataactagtaagccaatcccaggcttcctagccatttgagccagtgcctcccaactctctcctgtgtctgaccggtgtgttcttttcattcccgcttttccttcatccattgcattggctccatccctggctccattatgcaggaccctgcactgaaaacagtccttacactgtctcctcctcatggttgggttggaggcgggaggcaactcaaggctctgtctgtctctaaggacacctctccaggcaccttccatgaagtcctaatcacaaccaggtctgttctctccactccctccatccatctgtagaagaaatgatgtcatcagttagactacagctgatggaaggcaattctggtgtggcctggctggagagctctaggactggggtggaaggatgaaggaggaagaggaggggggaaggtagtgtggatccccttcttgcctcctgcagccctgaacctctggatgcatgatgagaggaggtgaggtgctcctcttggcaagatggctgcacacctaattaacctgtggctttaattacacttcacagcccagtcctgctgggaggaaggattgttcagagattgtcacactgggctaactgtctgcagcggtttctacttcaggaatgcctctccttgaaagggtaggaccggggaggatggctccatacagacctggggcctaggtggggtagggacggaggggccatgcctatggctttgccctggtcacctgctggggaaatcttcttaacctaggatgaatcttggcctggtttggtgctgtggcctcctccaggggcacagaggaaaatgatggtagggattgggagaacatgggggagaaggcataagaagccttaggggtgggtgaaagccttcagccccagggattctgatgggatctgcttcgtattctcaaataacaactaccatgtatgaggacttactacaggccagtctctcaccgaagtcctcataaaggcctctgaaggagcgatgagccccggtttacacacgaggaaaagacctcagagaggttaagaaacttgcctaacatctcacaactatatagaggtagaggcaggatttgaacctaggccacggcgaagccaaagtgtgctctttccacgtgactgggcctctcctgtggctcctgaggagcacagtgccagacagagcccgggaaatgcatgtggtgttggagggagattggaaaccaggagggtcaagcaattcgaggaggcagagtttcctgcagggatgttgttcagaagcgctgtcttgctgggagccccagagcggggtttctggctcattctgtgtcctggagaggtgatgggaagccactctatccttcagtacaggaggtgctttctcaaccagcattgccatggcctcctcctctctctagccctgtactggttcccaggctgtccctctcttgtggcctctctgggatagcagccttggtgcctgttcctctgttaggagcgtgtgtcctgggctcactttctgagctcccaggatgcaggcattaaccttgggttgcaagctctgtgcatgtgtgtgctgggcagggcttcatttcacagaggcccaggggcagagtctgctgtcctggggaaaccccaccttccagctgggcctgaattcaggatttcccccttcttgggcaaaaccccagattccatctcagatctttccatatgcacagggaatgtgggtaaatcaaggcctgggacgagccccggctgccccacagtctcctacactgaactgcacaaccctgaccttgctcaggtgtgacacagaggctgaatggggtgaccatgtcttggatgatcgatgtgacaggcattctgttttctaaacacaggctccctaatccccagggggccatcccaagagctgttccttcatctcatgaatagggaaaccaaggctctggttgctaagtcttcgaccccaagacacactctgtccattcctctgccgctctgatgggggtgggagagtgagggtcgtgagatggcagctttggggggaaggggctcagctgttacatgagaggaggggcttgctgtacatctcccctgacttctgtgtgctcaagaatggcctttgggcctatccacttgagagtaggctcccaggacgggctgtctgcccccatcttcacagaaatgtcctggcctcagtgagagagcccgtggctgtcagcccacatgttcagcctgattcacacccgctatttgctgtagaggtttggggtggtgagtcccagataatacaccctcacctgctctgggctaaatgatgatgatattgagagaaaccttttttttttttttttttttttgagatggagactcactctgtcaccaggccagagtgcagtggcgcaatctcagctcactgcaacctccacctcccgggttcaagtgatcctcctgcctcagcctcctgagtagctgggactacaggcgcatgccaccatgcccagctaattttttgtatttttagtagagatggggtttcaccatgttggccaggaaggtctccatgtcttgaccttgtgatctgcctgcctcagcctcccaaagtgctgggattgcaggtgtgaggcactgcgtccagccgacaccattttttaacggaccacttcgctgttgttgaaggacatctgcatcctcatttacttcttccagaagccacaacttccctttcctgaactccatgccagacactgttttaatgccttctgtacattatctcacttaattcttacaattactaagttctgagtttggtactgttatacccattttagaggtgaagaaattctccagaaagggtatgaccaaggtcatacatctactaagaggcaattttaaacccttgtcttccaattccaaattccatgatttgtcccatcctaccacatggcctctgctgttggtgtgagcatgctggggtattatggggtgtcaggacctggccctgagccctggggttccaaacttcctgaaggcactccccgcctctcacccatccagagccagccacctccggtcctccaggccccaccatcaaaaagggactcagttcatccagcgaggagcttgggcatctgcatattttttagggctcccgggtgaatcaggcaccttttcctgcctttgtcttcagctcctggtgctgcctgtactgcatcaccatgccgtctccctgctatgagcttcatttcccagggcagagacagagcagcatttgtctttgtgtctctttgcccagcccaaagccaggcaccaaggcctcagtaaatgtgtgtcgagttattgttaaagagagagctaaagccatgagacatcccagttttcccctcctatatctttctttctaagcctggatggagaatcttctcaaaaagaagatccttgattttctgtttccactgtagggtgaggaccagaggtccggaacccctgcaggattgcaaggtcacttgataagcctcagtggctggaaatggagcaagggacactggctgggtgctgtgtggagcaaccatggaatagcattgtctttctttttctttctctttttttctctcactctcatacacacacacacagacacacatacacacacacacatacatgtgaacggagggagtaaatctttaaatacagtggtgggtgggcacgatgtgcaaggcttgggggaacacattttatactctctgtgtttatccctgatgtgttcacaggaccctccctcatcccacagaagaagcttagataattaaaacctaacacagacccttcccttacccacagtcccctcgcctaaagacacccccactgtgagttcctccccagaaggaagtgaggaatggagaagaaagtagggaagtctcaacccccgctccctgcactgagaacccctctccagagagtggagagtggagtgtgggtgcattgataggagtctgagtaaaagctccctttcatctcaggctgaaacactgagccttgatttcctgccagccgctctgtccataaagaaattgccctgccacgggtccaccgggtccgtgtcttatgcagcctcgttgaaaactgggtggcattgatggagcaggctgctctgggaagctcgggtttcctctgcccagcagcctgagccacatcaaaggtgcacttgtggtgggaggcagggcactgctctttgggctgtcctttggtgacacccagccctgggcagctgcagccccccagctccagctgcaggcctctgtgcccctcagctcctgaaccctgagcccagggaaaacccctgccactgttggttgacacctacctgctgcttggatagccatgcctctctccccctgtcttcaaatgggcccaatttggtccttctccagaaacctgcacctaactcagctggctcctggattgtctatgctttttcttgtctgccaagattttgaatgcgtagcccccacctactgcatgtgtgtaatccccaaatttgacattgttgacatcttctcaaaaccctgtccttccccagcttcctcctgactctcctccacacctcgtcctcactctctcctctgcctccactctcctctcctcccattcagatcccacccacccatcagggctatatccagccatacctgatgcacgaggccccttctcctgggccctgaactctggagtgccttcaaataatcctttaacaaatacccactgtgcatctacaggtgccgaatactcttccactgccttagaatggaaaagtactgacaagaaccctgtccccatggagtttatattctaagcaggggagatagaaaaaacagtgttcgattctcagtttattattgattagaggccagaccttatgaagctagatgttaacatataggtggataagttgcaagtgatttttaccaagttgagatgcaaattatttctctccagtagaaaagataactccaaaagttatggtgttattgtcctgtaggacagttctgtctcgacataacagacttatttctgcgtgcctttgccgatcatgcaaaccccgttcttcaagttcttttgagccagatttgctattcctcattaatgagttaaataaatatacacatatgaaagcattttgaaaattatactttgacagtggcttatacattttctgtgtctttccttagtttggtctgcctcctggcatttctggaattggaattatactatattggagtatactggaattggatttatactgtacttggtatctgtcttagttcattttctgttgcttgtaacagaatacatgaaactgggtaacttataaagaaatggaatctatttctcactgttatggaggctaagatgtccaaggtcaagggactgcatctagtgagggcctttttgctgttgggaactctacagaatcccaaggtggtgcagggtaccacatggcaaaggagctaagcatgcaaatgtgctcacttaagtcttttcctcttctggaaggagccaccagttcccctcccatgataacccattaacccatgaatgaactagtccattcataaggacagagctctcatgatccaatcacctctcaaaggctccacctctaacactgctacattggggattaaatttcaacatgagatttgaaggggttgttcagaccatagcagtatggataaggggaagaatcaatgtttcaattgagaagtgcttagcagatctcacttagctctcaagtgagggtggaggtggccaaagaaggttatcctggctttggcttccctgtgatctaccctagagaatgaggggagggtcagggtctgtgtatgttagaggtagtcccaggggctatctagtgagcccttgtccaccctcagctcctgagagcaaaaccctgatacagccctaacactgagtggggcagaaggaagggggcaagagcaagacccgtgtgcatgagtaggtgttgggaggtcaggggatgtccccaagggtacgctggcttgcaaatttgccccatgctcagagggcaagggtaacattgtgggagtgttcttttatgtctaaacattaccaccctctcattcctcatgcttttctgggtgggaagttctgctttatattttattccaattattccattatagtttagaccggggatgcaaagagaggctggaatatctggaaatgcagctgggattgtagtgggagggcttgtttgtggtgcaaagcagctgcccttttcatctaagcagctgtgtttctgttctgagaatgggggtggtggtggtaggggatgtgtatggagcagaactgaacatagatggggggagggtggtaaggatgattggatgattctgtgggttcccaggcctggccgttgctcaacacagaagaccaaggcttcccttggcttaaaaaagcccaattgccatcctggctctctcagcctcctgagtgcctgttcctccaggaaaccaaagtagcccagagtaagggaaagggtttgccccaccccaagcttccaaatctcccaattcctaatttcagcactcagggcagcaccagcaagccccttagaaggttgttgtttaaaatagggatttccattcagtttaaaggttgaatgtgttcagtgtttatttaaattggtatgggaaagctttactaacatccttttctaattggagctgaggtgactttaaaaagtaactaatcagtggtgtgggccactatttggggagcatttgttagttcctggagactgagggtgacaggaaaggaaggacatttcttcttttctctctctttcttcattttcacgctcctgacttgtcagttactcccatcctgctctgtcgtcccctcatttggttcatgtaccacccagcagccacctctcaggggtcatttaccaacaccagacattggagacgcaaagatggatgaaatgcttttcccagctgcagacactcctagtccagtggacagtgacccttcatgagtggacagtgcttttaggttgacagagcacagtcacatttgttgtgttttgagtctcgtgagaactggggagacaagccaaggcaagcattatccatctcaggaggaagttgaggctcagagaggttgcagaacagctccaaagtcacacaggtggtgtttggccaagccagaatgagaagagccttctgggtaatggccaagcccataatctctggccatgcaggggctggcaatcaaaggttacaggaattggtgggatggagacaaaaacagtctgcatggtaggcaggcccctgggaggagggtccccctgaaactggagtgtttcagggatcaggattgctctctccattgcctggaaaaaagtgaagagctcaaatgaccccctcaggccaaccactctttcatccctggaagtcacattctggtggccaaggagtcctgagtccctatttattctctattccacctccctaccctcaacctcagccagttacaatgagaggaattggagttaaatatgcaatgaagcctgggcaacatagcaagaccctatctctctaaaaacatacaaaaaattagccaggtatgggaatgcacacctacagtcacagcactttggaaggctgaggtgagaggatcacttgagcccaggagtttgaggctgtggtgagctatgatcgcaccactgcactccagtctgggcaacagagcaagaccctttctctaaataataataataataagcatcaaatgaagaacatttcttcagtgagacaggatggggtggggagtcaattacaaaaggagcttgtgaagtaaaaactggcatgatgtcctttaataggtgacagataatgtcctttctggctggggaggaccctgatgctgtcaggggtggggacaggtggaggaaggctgtgggcaggaagagggtgtgtaggggagcagtggggtctgagtggtggattggctatggtgcttgagtgaaattgtgctcatccctagaaggagtgagtgctcagggcttctgccattcctctgacctttcatgctggccttcctgaaggcaagagagggtgcaaaagagataacctctcagagttccaccaggccctggttctcccattcgggaagtttttcctacagagtattctggactttcagggaggcagtgtgaggtttggtcagactgatcatcagatttagtaggggaactttaagaaaagactgagtatgggcccacccatgagattcagatttgataggtccaggtggggctgggagcctgaatgtttgctctaaaagagcaacatcctaatccaaataccaactatttgttcaccggaaatgaggtgcaatcaatttccatcagtgtggaggagcctggtgggaggccagccgtaacatattgttgcctgggtatgttatatttgcagtctgcaccttaactcccagctctccagagaagctggggtgggtcattctaaagtgtaaagtgttctaacacactttagattggcctctttaagcaacaacagttttacattgttagccattgtgtttgtggttctctataaaatgtgttatatgcatccctgccttcttacacggagtaatgcaagcataaatgtaaccttttcttggtgtcccaagggtatgttagaaaccttaattaatggactgggctctgattcagtggggtgtatgggacaatttgcttacgccaaatggccccctgaggttttgagttttgtgcctgctctttcctttttccagctgtgcctcttgctgacggatgtcccttcttgctagacacaatgtatctgcctaaagcaaatttttcttcacttttaatttgcatttcttatatgggcttggaaaatggataactaaagttcttataactgagtagggcaccttgtggtaaacttcccatcctctattccacacctcctcccggagtaacagcagtgaaacttgggcttgcctaaggggatggccttgacaggtttaagggtacgtatgctgtttagctttagcaggggttgggccataaatggatacatgacacaattttgactaatgggatttgaggagaggtttttgatttctaagaaagttcttcctctttgtcaataaagagccaccagaagtcattctctaggtagatgttaaacaaggaaggctgccctgattgttcttggcagctgaattaaaacttcaagaactttctttttattattattatttatttatttatttatttattgagataagagtctcgctctgtcgcccaggctggagtgcagtggcgcaatctcagctcactgcaatctccgcctccaaggttcatgcgattctcctgcctcagcctcctgagtggctggcattacaggcgcctgccactgtgcctggctaattttttgtatttttagtagagatggggtttcaccatgttagccaggcttgtttcgaactcctgacctcgtgattcgcctgccttgacctcccaaagtgctgggattacaggcatgagccaccgcacctggccaccttcaagaactttctttgggaagaggccccctgaggatggagaatggcaggatgtggaattttagcggctggcagagatggaaagaacctgaactacatgatttttttttttatctctaaagttcctctcatgtgaattattctattttctttggtttaagcctctttgaattgaattgggttttgggttacttgaactaaaagcatgtcaatggtaaatactgagtggatgaactaatagtgtgtgggtgcaaggggaagcctgaggttttagtgggggcacttttttactgtgtttcggtttctccaaaggtggttttatgttttgatttggaagtaggcttatttctttatgagatttccaggtgggtagtgactgcttctcattcacttttgtgtcctcagtacttgttgcagtgccgtgcacttactggacattcaaaaaacttaaattgacttgaactcagccatctgcaggtgtctgcagcgtgctttccccttcttggtggtaactatacctgcttgttgatctttacctatcacggtcactgggatgatagacatatgacacactatggatgctagtaattttttttgtagtgcttcccaggttacaaagtgccacctcatccttatctccggaaataagtatgtccggggtcatcaccattttacagataagaaaaccaaaggactgtgtgtttacttgaagtttaattttctgactagttcttaacaaatttaatttggaaatggcatccaaagcattttctttgagaataaataaccctgtgctcaaaaaggaatccctcttttagtatttctcctaaacaagtgtcccactgtttgctgagacgtgaatgacttataatgatcaatgtctgcaggtcggggcttcaagaggctactttggctggggactgcccctgcctcccacggctccctccaaagaactgcaatttgctgtcaggttacaacacttcaggattcacagcttgagcttctcacttagttaattggtgcttattcttcaaattgggttgttttcgccagtagaagagaagcaggagtttgcatccgtctgctgctcttgcaagctttgcagcaagaaaatgaactgggaaacttgaggtgtttcttacttagaacggtgattatccacacaaaagcatttgggagcaggacactgagtaggtctgcttctgagggaatgcatgggttctcctgtgtctattaagactggcaggctcctttggaatgcaatgcactgggttaatggaatagtgaaagttgagctccacctccatcccccatccgtgatgcctgtccacctgactccagcatagggctccaagaatgatgccctccagactcctcttcccttgctctctccccatgatccaatgggtttcactcatttgtgttttccggcacttgggtttctccatccttgtgctcactggggcctcttgacatgctaggatgcacagcctattctgattcttgtgccttggttgtctagctgatttctctttcacttcaaaacacctatggaaatggttgtggagaacacttattttgacattgtttcaaatatggcattacatgtgtatcttgtctcctggagggcaaggattgtgttttacattgcttttggaggaatgagcagctcccagcatgcaccttatcgtgtagaatttagagttatcaaaggagttggttacccaataagtgcctgaggaatgtcatcacctcttctttttgctatatggattccctgtgctcgcttctcctgccactaagtaccttgcctggctactcgctgtgaggctgaatgcaggtgtcgccaggcctgggctttcaagggcatgaatgggtatgaacttagctcatgttgtctaagtgcattcttcagtacattataaatgtacattcagtacattataaatgcattcttcagtacattataaatacattctggatttttggtcactgggaattatgaaagggagataggtaggaagcgaagagttggatagagtggggcagatgtattgagtatgaagggaaaaaggtttaaagattcctccacttccctgacggctgcagctctttgtgaattttctgctgccaccagcaaaggtttaaaaaaacagtggaggtcagggtgggggtggttccttctccaaaatctatggttcttggacttgtttctctttttctctatgatacgcctgctgctcctcaggcctccacagaaaaactcaccccagggaggctgagctgtggccagtggctgccacccactgtatgagagagggtggggatgctgtggtcattcccacattcagactcccctgagatttcccttcaagcattggctgtctgagtttatggtctcttcccacagcctttccatcttctccagcatcaccccctatcccttgccacatcttgctggggcccagtactttgagctctggggggctcttggatatgaaatctgccctgctcctcccagggctgcctcctggggatcagccggctccccatctagtgcagtcccttgcaaaacgaggccaagcctctgggattcagtgtgggctcccacttcatccttatttctcgcctcaggtggttctccacctggagcagatcaactacgaccacgtacgcaggtgtctgaaagtatggggctgttttgggtatccaggtgactggggtaccctattgtcatttggtggccagggatgctaaatccttgcagctcaccaggaaggtgcatccctcaaaaaatgccatggctcccctgttaagaagcactgtgcaccccaggctggagttccggctttagctggagtcacagtaggtttgagtccctgggtttgagttcctgctgtgccacctattggcctgttactttagttccctagcctctgtctcctcacctgcaccctggggtgatgacagtgaccccacttcacagagtttagataggattagatttgtgaatatacctaaggcactctggacagtgccaggtgcatgccaaatgccagagaggcatttgctgttatgatgccctttatagcctcttcctgcctgacctccaaggccacccctttggcctcaggttgaaactgttgtcctggcacttgcctcatgatgactgggctgtggccaccatgactgagaacctttgcccagggtttgcacctgcaccacctctgggacctgctccccatggcccattccttcccagtccagctcctctctcctgcccttgccctattctatccttcgggagggctgctcctttgttctgttttcttttgttgtttttgagacagagtcttactctgttgcccaggatagagtgcagtgactcaatcttggctcactgcaacctccgcctcctgggtccaagcgagtctcctgcctcaacctcctgagtagctgggactacaggcgtgtgccaccatgcccagctaatttttgtatttttagtagagatggggtttcaccacgttagccaggatggtctcaatctcttgatctcgtgatctgcccgcctcagcctcccaaagtgctgggattacaggcgtgagccactatgcccaacctgttccttttattaggagtctattttcatggctctctttttctctctttttctctctgtccccatagctgttgtggatgtttgttgttttcttctttagaacctgttttagcctgtgtagattcttaggccccactccagagattgtgctgcaggatgtccagttgggaccaagtatcagcgtggaaccagatgctggcagtcttcatggagccagcctcccgctccattggtcctgtctgcatgactgctcctccctggggaggggaaggagaaagggagggtccttgctgccctcagccccaggaggtagaggctcatttgtggttacagctggtcaccatttgcctcaggtacagatgtcgttatctttggtgggtttaaaaaaaaaaaaatctacttaaggccgggcatggtggctcactcctgtaatcccagcactttgggaggccgaggtgggtggatcacctgcggtagggagtttgagaccagcctggccagcatggggaaaccccatctctactaaaaatacaaatcagccgggcatggtcacaggcgcctgtaatcccagctacttgggaggctgagtaacgagaatcgcttgaacccgggaggcagatgttgcagtgagctgagatcgcaccactgcactcttgcctgggcgacaagagtgagactccatctaaaaaaaaagaaaaatctacttaaaattctacatttatattttcttccagctggggacatgcctcaattctaaattactgctttgggaaatgaaagatgatagaaggtgagaggtggcattgctttcccttaggaatgtggtgtagtgggaaggagggcctccgggctggaacttgaccgcctgggtttctagctccgactccatcactagctgttgtgtgaccttggttgagtcacctgccatctctcgccctcattttcctcatttctaacatgaaagggttggacaggttggacttgctgaagttgtcttcccaccctcaaagtctataagtcaataagtctatttaattgtgctgacagctttagagtggctaattaatgagagtttagtgggaacacaattaggtgataatgaaggcctcagaagtaaatctctctacttcttgtaatgagttgagccaatgagacttggagtatcttttcactgagtggagcccctgggaagagggaacaaagagccccaggctcctacttggggcctaaaggaggccaggagtcagggatgaagtcacacctcatgagaagctgggtagctagctgactgtcctgcagccaaatgggtggactagcagggtaggcctggagctttgtggggtggagtggaattctggcagctctgcagacctgggtaacactgacccagccttccgtccatttccagaacacgttcacctgctttgccttgtggaatcctctcacatctggtgaaatagataagcctggaacttttatcttccccatttaacagatgagaagtggaggctcagagcagtgactggcccaaggtcaaggagctgataagtgacagatcaggattcggcaaggttcttgatcccaaagccccgtcctttccgctctacctgactagctcctccagtctgagggccaacctctgcgggctgctgtgagtgagcgaccccagagtgaagtgggtcttgctgttcagagctctcccagagggtttgccaaggctccctgggccttggctttgtggatgggccctgggagaaggaaagatcaggttggtataagaggtggggatgcctggtctgtggtaagaaggccccaagggaggctcctgtgaggctcctcagcatcttgacaggctgtggccttgctgctgagagctgcctcagccaggtacatcactgtcaccgagctcaccatggcggtcgtcgggcagtgtttgctgcctgaggttgcatcaagctgggaatgccctaaagtgggggcgtgaggaagagaaggggtgatacctagaggctggggtatctctgtcccaaggagacaaactataacaagacccagcgaggagagaggcccactctgggtggtgtggggcaggggcagggtctcctggcctgagggtagaggcctcaggccgatgagcttccctcaaagactctggctgctggtgactttggctgcagaaacacagaccttgacttttcccttctgagtgaaacagggcacaggcattatgcagagatgcagcatctttgctgcagagggagggaggagggaaggaagggagggagcaagcatttgtctgggtcctgccctagaaatgcttcaagtaataaaatcaggatgacttaagaaatccattacccctcttggcctcccacggccaccaacatgccctggtggagacgggggggggagaggcctggggaccagccaggtagcgtggcctcagtctcctggcctgtgaaccaggggatggggtaaggtccccatcagctctgacctcaggcgggtctggagtagagaaaatcttctggagaggggcagaggagggattgagaggagatgcaagaaggataggcgagaagaggaggagctagaggagaggagaggaaactgaaggaggctgaggagaggggaggtgaagaaagacatgagaaagagagcagaacacaggtgttcgagtctctgccttgccacggaaaagtctgtgacctgggtccggtcaggcacgctgagcctcggcttccacacctaaagaggagatggcagtgcccactgcactgttgtgaaggggtaaagggcagtttacaaaccatagtgccacacaaaatgatatgttgaattcacaagaaaaaagcaagaaaggaggtagggaaggtggagccagggcaacaggagagagccttttcggggcttcccttccctggggtgtggacacaggacagcgtgtgggaatggcaagtaaagaacccaagggtggaccagagagggaactaatcctcccttggcgaggctgtttgcaccccttccaggagacagaaaccaggggctccctgcatctctagctgaaggatctttgcctgtgcaagaacattcctcatgggggctgggcaggtcgaacgctactcgggctgccttcccagaggcccagggcaaggacagggcagtcttgggctttggggtctcacggaacgtcccaatttctgtcagacttaaactcttgaagggctgaggaggctggtgtgaggggtgcacggttataaaagaaagcccttgacagaatcctgcacaggaaggctagaaagacaaaaagagaaaaatatggctgaagaacattctggaaagccccaaaccaagacagtgctctcagtccatgtgggcccagccccacagtccctccttccactgctcgtgcctggatcttggcatgtgtgaggccaaggcggggaagcacggggccggggtcagggcagccagctcccctggcaggctagatttatgatttggctgagctggggagagagggagcctgcgacaatccagggtatgaaaggcagcccagtgtttcctagagcagccgtggtgccaaaggcagggacgtccatctggcctttttatgtagtacatttgtcacccagatcccggggcccagacggcctcccttctgccacccgtagccgccaaggccagttcccaccttcggcagcctctgttgtgggacctgcaaccccagtagatgctgagtgtgtgtgttggagaagagctgccccctcccttgggaccctcttaggcttcgccctccagctggcgcccatccaagttggtgtctactcagtgttccatggggatgaaaagccctggagtcagagaggggaaaggccctcagactagtgctgtgatctcaggctgtgttctgaggtgttcggagcacctccaagccatcttaagagctgctgaatgaggctgacagccaggctccagcccttgacccatcaacgtagctctgcttctgtctgatctggatatatacagatattttaggtaagatgtcacttgaataatgagaaatggaggctcagagtggtgagaatgggttctgctgctgaaaagtaaacagtttgaagaccacaaatctggtctcatttcaaagaggaagatacagtgggccagagaagaccagcagcccagccaattgttggcagaatagggacgagaacccaaacctcctggccccccagccatgatctccccatgatactgggctgtctcatgaggtgctggcctgagcatttatggccatcccttcttttcaaccccagggcctccctctcaagcttgggtgctgtgtcctctcagctttacctatgctggggggtgcttcaggatgtaaaccatgtgtggcccaggccagccgctttcaggtatgaatcaagacctctgtggctgacccatgattacagcttcttctgcccagagcctgtctctagtgtggcagggtgtggccaccctgtcatcccaggggctgttggtggttatcgagggttttctggtagagtgtaggccattcccttttcttaccttttggtctctggagaaacttgtcctgttctactcaggcctccatttgttcatttgggattctgatggttgttgctgacccagccaccctctgccatggtccctgggttctgttccagaaaaccccagactaacatttttcccaggcaagcagctctctccacccccaccacccgatgtcctgcttctcacagggtccctccagccctggccatggtcctggtttccagcttggcttgccctgggttacgttctgcctctttggctggactcacttttccaacctgacatgttgcccctctgcctcttctctctgggtttacaccccggcttccctcctgctaaacacccctctcagctccttccagctaggcccttcccctttaagcagctcacctggaggcctccttcccactgcaagagccactacctccgtttcccaggattcagtagaagaagaaataaaggatccagcatctctgagggccaggcatcgtgggtggcacagtacccatttcatccaatttgatttctcacaacagccctatgaagtagatattaatattcccacttgtcacacagggaaaccgagtctcagagatttagcagcttgctcaaggtcacacaattgatacatttacactcctggtcctgcctaacccctgagccaaggcagtcaaccacaatagtaagctgcctaggcggtcacctctcatggtcaagccaataacccttaggactagggtggcacagcctgtggtgatctgtctccaaagagctcctcccagtaccaaatccctcactgtttaccttgttctccatttctccctacagacccatcagcacacacccatcatggcagggaaacgtaggaaggagaagcaggggcctccccactttcacaggccaagaaagagtaatcacttttgtactcgttgagaaccactataattgtttgcaaagaaggaggtaaatatgaaagccatagatggggtcctggcctcctctgtggtagccaagatatgaaacagagaggtgttcagacctacaggtggctaatcttacaggagagggagagacgagaggctgtggaatatcctctactccccactatactctctgcagtcctggtttccctccaaatgaattgtgcaggcagcctggagttaccactcgctcttgttatctgtggggtgtcttggtgggcagcacagaggagggaaggttgaggaagtcgggctgtagtggtgccgggctgatggcacactccagaagggcttgctgtcctcccagcccaggacccgcaggaagcctggtgaagaggatatggctctgagatggggccaggtggggagaggcttctgaggcttatggagaatgggtgtggggacaggtgggcttgaggtgggggggccaatgaccaaaatgggagcatgaaaggacctgggctgggaaaaggaggggcgatgccgctgactatttcgtgaaatgcttcttccaaagttgttccccaagagtattcagcagggggagctgactgctgacagcagcagctgtgggggaggcaggagcgggaggggtggcattatcaccctcccagagcgggtggcaagggggcggggaggaagggatggtgtctcctgcctgttctggattctgtgtctctcaccgcccatccccctgtctccaaacccaggaggagagagggattgcatgaaattagagagggaccgatagatactctgggaagatgcacacactgcttctcaccctcctctcttgctcacatgcacacatacagtctctcacacactcttacacacactctttctcttcctcgctgtctcactctctaagccagggcattacaccactgctctctggtccagccaaagttggagtattcctgggacaaataatccaccccacgaggataaatcatcctaaaccatcctcaggcagctttgaggaaacacgggagagggagccagcccttgtggggtggccagggcttggccagctgggaggacagtctggcactggtgattggtgtgtcacagccgtgctgcgagctgcttccagtgcttttgtctggtgctgggagtgaggctcagcagtgtgagggacaattggagatgctcgggggcaggctgccgcgttgtgtcctgcttttctgcggccagaccaagccgtctggagctgctggtcaggttttcttgctgacctcacctgaccacagtggcctgggtggactctacagggaaatgttgttttctccctgggagcagtagcagcagtcctggctcccctggactgagaactcctcatcagccccaggaagcccggaccccctttcagggatctggaaccggtgtgcctgtggccccaggtctgctcccaggcgtgggctgaagtcctgacttctgtcgctgggggcaaggagtgggagagcccagctgctgcctgggctttggcagacagcaggctgatggtgctggcttccccgagactgcttctcctgcctgctgtctgatttccctgcatggtgcccgcagctgagctgctacgggtgagtacttggacacatgtccctttctgcgtttgctgggatgtacctaagcgagtcacagtggaccagctctgaagctgtattttcagagagactagacattagtttgcctcacctcatgccaactggatggggtgggagatctagggagcagggccaatagggggtgaggaggtggggcatcagggagctggggctgcaggtatttttctcaggagtcaggagaccctggaaggagaagtttctcctactgcttccctctcctggttgggtagagatgtgtctaaaagcatgtggagggatggtgtctccgaaatgccccacacccacaggtgctccaggctttcacttgtactcttgctgcataacccctgctaggtgaagggcacagaatgcagagtgagatctgccctttcctttccctggccatgtggcttatccctcctcccacgctgtcatcatcgtcctggagccattgaaaagtctctgtgatccttctgcttttgccctggagcccctgacccgtgggctgctgggcttcacagagtcactttgctatcagcactgccaggaaagggcacgggaactctttttttctttgcaaacagtggtgggtccccacttagaacgtgcacaaaatgaaacacaatgagggtggagaaccacagcccttggacccagggaccctctgttatagcctggacccctgcctacccatcaaaaccattccccttggtggttacagttttgttttcagcttgggctgcctccgggaataaggagatctaggaggtcgccacatgcttcctgtatccgtaacgggttctcagccatctgttttgccgtcacagggatgcccatcttcctagaattcctaacatgcctgcgatcatgttttctctcctttgtgatagtatggtctttgcttatatctccctaagtctcataccatgagtatgtttcgacaagataacctctgaggtcccactgggaacatttccaactttccagagggttgtgtgtggcacaactctggtgcacccccacccccacccaatatacccctatcctttggagcttgcctgaaatctaaggcagggctgaaggaccatgattctgactcatctgagattttccttcttacaactcagtaatcatggcgtggagggtgcagcagtgtttaggtcaaggtttctcaacagcagcacattggaaattggagatggataattcttgatgtggcggaaggggactgtcctatgccttgtaggatgtttggcagcttccctggcttccacctgtgtgatgccagtagcaccttcatttgtgacagcccaaaatgcctccagacattaccaaagttcccccaagggcaaaattactcctggctgagaactactggttcaggttaacactgctgctgctacatcttctccttgggccctcatgtggcctttggtcccctgagactcggtctcatcctagccaagtgaagtgtaaccatgtctggactaagagtgcaaaggcttgtgctctgtgtgtgatcttgctcacgttctcacccaatcctgactggagaatcacttctcccagcctccaccaatctctagctctttctagtggaactgctgtggtgaggctcggctgctggtttgggtcctccatctgtgcagtgtgaagtctgggaaggaaaatcccactgttgggtaccaccattccttcttgacacttgcccaaaagctaaaagtggcatcaaggccaggatgggtttagcatccggagcatgtgtgagcatacacacgcgtgtgcatatatgtacacatacacttgctggcagctttctgggtcctgtactgaatgtgaatgatggggaggtgagccctgccttcgggagctgttgagtgagacagacatcatgttctgcaccaataatgaaataaatcaatctagaggattctgtgtcttgcttggattaagtctcatcttaaaggcaaaatacttctgaggaagagtaagcaagggagaagagcctcatgagtttcttgttatcagaacccctgtggggtcacaggggtcctgttcttcatcggtccaggagggctccatgaaggagaccttccagaacctatgatgtgaacaggaggcagtgtggttgtgtgtgtgtgtgtgtgcacatgtatgtcatacattgtgaagccctcgggtccttctcttacctgacagtgagtttgggggggcaggtagagaagacagctcatgagtgcccttgtctcctcccatgcaggcaaagttacacctggttgagaactactggttcaggtgaaacctgctgctgctgctgctgctgctacaccctctccttgggctctcatgtggcctttggccccatgagtctgggtctcaacatggccaagcatttggccaagggcaaaatccttctgcttaggaagtatttccttctgtgtaggaaaaaaggtatcgcccttctttccatgtctcccattgactctgcagaaacttgtcctcaaaggtggagggcaggatccccacctccccctcagcagaggagggaatgataggaagcctcatgttgcagagaagttattggccaaaatccaatttgtggaagggcgctgagaggtgctccaggtgccacaaaccaacaaatcatctcttaatcagcctgctgggctttgaaatgccttgtgtgatccatttcagcagattttatctctaatgatgctcgattctggtaggtaagtttacaatctctaaacagcatctaaagaacagggacagggaggtggctggacagtgctgcctgggatctttagtcaccccagacaagccacagcatattatttttagggccctgagtcttcatggtctctgcctaactacgcagaatcagtttgcccccagcaactgtttgggagtcttcacccttctcctctttttctgacctttactcccccagggaaccaattttctctgaaaagctcaacggacattggagtaagggagagaaatctcgccagacaggcagctttggggtaaataagcaattctgtgatttgcacctttccaacctctagggtgtaatgctctgaggtttgcagtttcatggccccacgacagagctgggtcgcatctaccctgtgtctattctgttctgtgctggtctgtgaaacttccagaagtgacatgaggattacccaaagtggaatagagacagagaggtccttcagagccccagaggcccttgtgggctgccatagaaggcacagcacatgtccatgagaccaggcacggaatcaggaagccttaccagagccctggtgggccagtctagggtcgactatgaggggaaggttcagagccaggacactgcctctgcagcctcagtgcagctctgcacttgggacctttctccccacaactaagcctggcaacatcaggcagcagaccccagctcacagccctccttgacccaccagcagcctctgtgcggctgctgggaatctgcaggggctctgagcctcccatctgaaactgatgggacaaggggccatctgtggacaataggagcttctcataagtttagggattccaagaccagtctcccagagcaggggtgtggactctctccgaacatatgctggttagatgcaaaaagattgttttcctctagcggagcagtgagaaagatgtagaggggacattttggagaagagggacttctgtccatactgtgccaattagcaacagaagccccactggccctccccagcaggtgggattacgcgatgggattcctcttaagtacactgatggcagagcctgcttctccagagcagaagggctgcattcatgcctgcattcatttctttatccaacttttaccgaatgcttaccagattagagctaggtgatgtgtctctggcttcgaggagctcccagtctcgaggaggacaaggctgattgaggtgtggtagccctcacgggcatgagagcccagatgaggcgagattaattggtttttctggccattctcccagcagagctttccaggccccaccccaaggccttaggagataacagatgtgaggtcaagtcacagctggaagcagcaggcttgctcccaactgccaagtcctagagaggcttgttaatctgtgctccccagggctggcaggaggctccccagtgtccctgaattgtccactctgtgttaattgctttctgtaatctgtgtgctccctctcttcctcctgctgctgtctgcctgtccaactggttgcttcattctcagtttcccattccgcccctccagtgggatccaggtggttggggttctgtagacttgactttagcacatggaggatacagacggtgtttgattttagctgggtatgggttttgtcctctcccttctgcctcacctccacactggggtttcatgctagagctgggtgccacaccttcttttcaggaaacctggctgtgagttcctggctctgccattaaaaccctatcgcctcagtttcctcacctacaaaaggaggggttttctagaacagtcattctccctgtgtgttccttgcaccagcagcagcagcatcacttggggactttttgaaatgcagattctcgagtctcaccccagagggagaatcaggatctctgtggctgggggccagcagccagggtttctgcatggcttctgggtggttctgatgcagctcaggtttgaagaccactactgttgcacatctctgaggccccccttccaactgcacttccttctatggctggtctcagcattttccaacttgcggtaagtaaccagtgacttgcaaagatccagtaaccacattctggagcactgccagctattttgcaggtatcataaaattctccaaattgaaaaaaaaaataaatttcaaaaacccaaccccaacaaaactcactacttatgtcctgatttttccagaaagggattcaaggtagtttacatccccattaatttcagtggctctcttctcccagtccctgtcaggaggaggctgcagaggtatgtgtgcaatccagtgaccaatacagggcgtccgtccatagcacacaccatggccacctgagaacctctgctgccccagcagcataaacactcctgccctttccgagcctctggggagagtggtgcctcagtgattttcatgagggctctatccccaaggagcagaatgcccaaacatctctctcctgctgctggcatttagcccattgctgagttaattcaagcagtgctaataaccagtttgagggagaggacctcttgcagacccctaaatcctactcagtggggtgctgatagcaggataagaatcctgcctgcccacctgcagccattcaaaaacagcatgtaaaaggcccgccactggctggattctgtggagataccaacagaagtagaacttttgtccctgtcctttgtgaacccacttatgggggggacaagactgcatcttcaatgtttagtagattcccccctccacctgcatttttcccttcccaggactttaccctctccaatctctctctctctctctcccctgccttcccggcatcactttactggaggtcctcaaaccccagcccatctggctccatggggttaagtgcagcatccctttttccgccggttctgtgagggcccagccccagctgagacctttcctggcctttctctggtctccaaggagcctgcaagaaatgcagcctgagaaaacagcctcccttcccttcccccacctctctgttcttcttccccacaatcccgggccccacacaagctccccaaggcctgctagctcacggccgggccctcctaaactcatgttttatgcaggaacatccccattctcatggaaagtgcagcaaagtttgggaaagaatttcaaacctcttttgaagatggtagagcaaatgcagggttatagggttaacttcagctgagagttttttcttggctgagtggacacccccttggcaaatgagtgcatgtttgtatgtgtgtgtgtgtgtgtctgtgtgtgtgttcctttctacccaccatttgcattgcagggaagtagagggaagaccagcacacttacacaccacacacacacacacacacacacacacacacaaatatgctctgggcctgcctcatctcccagtgccccctcctgcctctcttgccttatgaggagcaacaggagtgacttatcttggatttaaacattctttggatgcacagggaaaagagatcatttgtttttcaaatattagaaggaaaatgaaaatttgtatgcaactttggttttggtgatttttcagaagatctcatgtctctttgtttcaaaatgtcaaaaatggttgtatataattgatttaataaacatgtaactagctttttgggtatatcaaattgtatgttgcagtttgctctgctaataatttcaagtttcccattatcaaagcacctgtcctttcagaagtctcgcatccactttcttctgacactttttaataagtaggcaaaggcttgaacagaagaatccatctacaacacacttagagtaagacaaaggacagtattatgctttctggacttggtgttggcaagaaacagaaaagcacttattttcagaaaaggaattgtgaaaagaaaggagagggaaacctttaaatctcattgaacacaatttactccatagaattttatctaatcagccccattctttgagccatcaccttgagtcatttttgattctactaacacttcatttttatcatcttcccagagtcctgaaaactgaagatttgcctaaattgggacaagcttctctctcttttcacatgttaatttatttcttgatttggactatgtttttccaaatatggctccatttcttttcacatgtagtagaagacggaaggggcagattggaaccataggctggcgtggccaccctgttgggggatgggatttgcttgggagatcccctagctttctccgagctcacacctcctcccgcaagattccagctatctgcagcagtgagcagctgggcactggggtttgggagctttctgggggtagatctatcaaatgctgtggccattccccttttacctcttcatagatgtgcctccaaatcctagatccagtactttcacagaagctggagttgctggggacaacatttttctcatttttctttttctttcttttttttttttaagagacactgtatcacccaggctggagtgcagtggtgcaatcatagttcactgcagtctccaactcctgggctcaagggatcctcctgtttcagctaggacagagtagctagaactacaggcaagtgcaacctgctgggctaatttcttaaaaaaaatttttttaatttagagacagggtcttgctatattgcccaggctggtcttgaactcctggctagaagcaatcctcctgccttggcctctcaaagtgctgggattacaggtgtgagccactgtgcctggccatttttcattacagtaatccatttttaattcctctgtacttataagtggaaatgtacttggattctcaggaacaattgatttttctgtaggtcatttggaaaggaatgtcaaacaagttgcatcattatatgcagacgaaaagattgatgtagcttttttaacttaaaatcttatggtgtaatttttaggaatggttggggaacataaaaataccctatcctagacactttattcattctaaaaagttttaggatccagaaacgtatttgaaatcgtgtatttcaaagaagtctttgggagaaacagggggaaattatttttttcccctgtgatttttctgggcctttacattttcagttgtgtccctggggaattgcctgtgtcagacaaatttagaataaaatctaatttcctctttccttctctgaagctttctttttaattacttttttttaagtagaactttttttcaatttaaattttccttcagattcaggggatacatgtgcatgcttgttacatgggtatattgtgtactggtggggattgggcttctagcgtacccattacccaaatagcaaacattgtacccaatgggtaacctttgtcgttattcttaatgaaaactatttgtgatgtgcccaggattctgctgtgggtttttgttggagcagaggagccccagagggagagagagcaaagagacaaagacatgggcccaaacagaagccacagacggacgtgaagaggcatgggcatattggcagcccccgactgacaagcgacagcaaaggggggttttagtggcaaacccagatgctctccttctgaggccacccctgctgcccagaatgggagtgatagggttagtgggaggacctccaaacactttgccaggcttcttcattagctgtgggattggggaggtgaggcagacagacctgaggggagagttcccgctggaccttcagagcccgcctccagcttccaatccctgagggatggccctatggccctatgtgaatgagcctacagggccacggcggggggcgggagacagtgaaggagaagagaagaaggaaggttactcggagaattatgggcaagcccgccatagcaaaacgttgtaggaaggcaaaggcggcctgatagctgtttatttctttactcctctgcacgtaggaccaatgatgaagcgtatgatgaatttcctaagagccaaactctcggaatgacctgcccttgcttctttctccttcctcctcttttccctaccccttaccctgtcccttaccactccctttccctctgcttccacagcaggggtaagataatcacaacactaacattagtgagcagttactgaatgccaggctcaggtgaactggccctggtcaagcaggtcctgcccgactcttaaattcaatttggtaaacatcagtagcctccaatctaccttttttttttttttttttttttttttttttttttttgagacgagtctcgctctgtcgcccaggctggagtgcagtggcgtgatcttggttcactgcaagctccgcctcccgggttcacgccattctcctgcctcagcctcccgagtagctgggactacaggcgccagctctttacatcatcacccaagtcaagtaataggactctgtcagccattctagaagcttctctgtgctcccccaaaagtagcttggctttctcgtgtgtctttataggttttttttaccaccccgccccgtccccgccccgcggatgatttattgtgcacaaggtgaggctccagcttcctgagctcagaacaacccataatgcattgaacctgcaggagaaaaaaattaagttagactgcaaaaagattgttcaggattttagaatactagaaataagtgacatgaggacagagaaaaaaaatgaaacaaaacccccccaaaaaaatccttgagatgacttagatgtacttctggttggaggcagggaaataaaggagacgagccttgaagatcaccccaatgcctggagctgcccctcaaaattgactggccacatgccccttgcctcttctgaccagcaggaggttgaggagtgctgcaggtggggttgggggaatggacaccagtgatcacttcatcccgcagccgccctgcctggccagctggggtcggcctggtgtctctaacccttccttctgtgatcagaggcacgctcttcctcctgaagtctttaatcctgcctcagccggtcggagagagtgactctcgaaagagagaatgaccagctggtggacaggcctgggaactgagcccaccccattcccgggtgaccagggcagccgaacaaatacactctggccctaggcccgagggacatcaggcaaggtgcctggaggaaatggggcagtagaataagaggagagtgaatggtctccctgctttttctccattcagtgtgtggtttccatgggactctaagtgtgtttacaggcagcagacctggggggtggggggtggtgcatgaagggatctgggctgcatggctgcagggactagaaagggaagaccagggttggtggggaaacaggaggagggctggggcacttgaaaaaaccaaataaaaagttggctgttgaatgctttttgccaaccgtagtcaattcttaattatccccgtaatgggcgggagcggtggcagaaatcatgcaaagtagcaaacaatcccaaaccatttaagctacatgattttttaaaagagagagaagatttcccttcctaataatgtctggctcaggctgatattaaatgagggaagtattaacagtgagctccccagggatcaaggctagagccaatcttatttaatgtgtttatgaattatttagcatccacatttcctgattttgtgaaccagtgctgggagggggctgtcagtcctctcaggagccagaggaaaccctcttccggagactatgccctcactagaggaaatcctccacatgggaaatgaggaagggtttggaggtgtcaggccaaccagctgctgctcatgggacatgagaagtcaagagactcgaccctccacccttgtcctacctgtggctaaaaggagtgtgggtctctgctctaaagcattgcatggctcccaacctctctctaaattaagtgcagccaaagccctccactgtacggtcccagcctctgctcctgtcactccagccctgacttgaggctcacagcctgcaggggctgatgacctgccatggtaacatggccaaacgcaaagcacttggaattatacccagacttccgactcagagactccatccatccgtgtcacaccagatcctggttgcctcccaaacccacatcacctgtttctggaatgagacccccttctgcttctatctactgtcaggattctgtctatctcaagtgccacctcctctgagaagcggagaagccttccctgctccaaaagtgttctttctctgctcaaaaaacagtgcctgtgtgcctctctcatggcttggttcaagctctgcctgtgtgacagcctcagtgttcttgtctcattctgcctccagcatgctgctttgtcctcggtgtgctgttcaggagttcgttgagaagagaatggggacctccatgggaaagagagtaggaagtgagtgtaggaagttagatctgactctcataggccagacatgctctcagggatgtagtgaccttatttcccaatggggccctacctgttggttttcccaggaagctgtcaaattcgcctggccacacatgaaccaaggctggggtcacgtctttcccttgtggaacatggagcagccctgggacggaagtcctcccaaagtggggtgcccagtcccctacctcagcatcacctgtggcacaggggcccaacacaagccccgaggggcctaggacccacattatgaccagctcttcaggtgtctcttatgttatgcacagaatggtctgagaactaatcctaaagggagggagggcagtcccctgggattcgtggagggcactcagagggggtgcacaagcacatgtccatttaacacacaccagcctgcaagagccaagtgtgtgttcatgcccacatttatgggtgccactccagtaactatgtccattctttctttgccatgtccccgaagtgctacctggtgacgtgctttaaaaaataatttaaggatacatgctacaacgtggataaaccctgaagacattatgctaagtgaagtaagccagacacaaaagggcaaatactgtaagaatctgcttacatgaagaacctacagtagtcaaatcagagacagatagtagaaatggtggctctcaggagcaggcggggagtggggattggggagttactgtttaatgggtagagtttcagcagggaaaaatgagtaggtgctagagatgaatggtggcgatagtacacagcagtgtgaatgcacttaattaccctgaactggacactgaaagattattaaaatggtaaattttgtgttatggatacttcaccacaataaaaataataataatttgggccattgcccaaatggaagagcatccaggaagagcacggctggccagaatgattggccttggtcctggtcttcaagctctccagggaagctgaccatcagtcaccaccacccaccccagcatccctgaaacagggagcgcttccttggtcctttttttttttttttttgacacggcttttcactcttgttgtacaggctggagtgcaatggcacgatctcggctcaccacaacctccacctcctgggttcaagcaattctcctgcctcagcctcccgagtagctgggattacaggcatgcaccaccacacctggataattttgtatttttagtagagacagggtttctccatgttgatcaggctggtcgcgaactcccaacctcagttgatctgcctgcctcagcctcccaaagtgctgggattacaggcgtgagccaccatgcccggccaattccttggtcctttagatccacaccagaatacatcatcctgggactgggatggggttttgtgtcatgagtcagagattggcttaagaatgaaacagaagagaaatgatactttttaagtgggggatgtcagtagcagagtccagtacaaaatgtgggtaacatcagcagcttccaagtgatgaaatgtcaggcgagctattgcgtatggcccaaataagtgtagcatcactttaccctggatatgcaaggacacacatttaggggaaaataaagtcatatccacaaatggggagttgccagtgctctgacataacccagtaaatctaaggcgctgttagaaatgttcccttaaaggttttgagcctgtatgctggtttggccaaaacaaacagccagatagccaggcattattgcaagggggctggagacaacacggtcccggccttgggaaaaccagatggatggcctgttgttccttctttaagggattgtctttctgaagtgagatgaaatatctacctggatcccaggacagaaaggaaaaagtgatggggggacatcccaattgtgaatccccctctcccttaaggctgccatagggtaacatgtggatttcatctccaagtccctgaaatcacaacaagagagaaggggagcccctgaaggcagccaaaagaaactgtagcacaaatgaaagtaagtgctatttacacagcaggaagtaaacttatgtggaactgggaacccccagaggtggcacaagctaaatccgggaagagagttgggaggatgtgaaagtgttcgtggatggcgggctgcttggccagctctgcagtccacatcaggcagaaaaccatttcttcctggagacaccaaggcgatctcagagacagaggggctctctgctgctccgatcctgaatgttctcctcggcgggtctttccactgtccacgttcaccttgtcttgtcctgagagcgaaggtgtctctggtcatcctctctcagttataacccttcagacacctgaggactttgcttcttcccccgcctcccatcccatttatcccattgttcttttccagcctgcagagccccagtgctttgtcccttcttttcaagacattctttgtgtcttgcgtctccctctctgaaccgccttcggagccactgtgcgatggctcacagggcaggctgaagatggccaagcaagacctgggcaggaggacgagcatgaagggagccaggtgacatttgaggttgcacagaaggggtggaaacagagcagcccagagctgcaggatgtggtaacaggtgtaaaaggggcctggaatagtggcagcactagcctcctctcctcttgttttaccctttgctcagttgagctgaacatgcatttattgagcacctatttactccccatcacgcaaggccctgaggatgaatgcctcttctgacacgaagctggctgtccatgcctctccacccctggaggctgcccagcggaggggtctgctcccagccttctatcacactgaaatgtttagaacgctggtcctgggagatggacctaacccaccaccgagagtctctttctgcccagaccctgtcattctctggcagttacctatttagctgtaaggttttcaggaacataactctaatcaccagtctatgggagtctattaaaagaaaaaacctagctctgtcatcatgggcttgtacagcccagggttgattttcttcctttctgaagtgtttgggatgctgcacgggtccctgtggccctacgccccgcctccccagcctgcctgtgaacattgagctgctcgcttccccagctcagtgagtggttcttttcaggggcaaccgactgcacagagattcctgagccatgatctcatcggctcatgagaggccgagcacgtccacccaccgactcgcatgggacagagaagggcaccctggggcccaggtggggccaggcctggttcaagggtttgccctttgggttagtgccagtgctggtggagttgccctctgcctataattctgtctcctgcgtcagtctgcaaactcagctgtgggtccctgcctgggggcaggactggctggctggttccgcatctgccatcactccactgggggccattcacagagcccctaggacacagtcttgcagaggtggtctggccctggctcagatgccttgctgcccacactcctacctccaacatccctttagtcggcaaatatttattgagtgacaactgcagtgcttcccaaagtgggcccatggagcccttggatcgcaaccatctggagggatggctaaaatgctggcttctgggcattgtgccaagcctagtgcatcagaatctctggggtggggcctggagacctgcattttaattggttctccccagtgagacttttgtactctagtgtttgagacttgctgactgtggtggttaattttatatgttaatttgggtgggccactgtgcccagatatttggtcagacattattctggatgtttttgtgagggtgtttttggatgacattaacatttaaatcctaggagcatgagaggctggctaggtagagctgtagtccctgttgccagccctgactcttctctgggtagagggttctgatcctgatgctctccataagacaggactgagttctaggagtgccagacttagcaagtaaaaatataggttgtccaattacatttgaatttcaggtaagcaacaaagagtatttcggtatgagtatgtctcatgcaatatttgggatgcacttatgctaaagaattatttgtcatttatttgcaattcgtttattattcagcgatcctgcaacagctctggacaccttcctcctccagcacggagtcagggattactttctgttaaccatatggccctttacaaagggctttctcaaatgtgatctcattcaatccttgtaagagtgggacaggaaggcatagtaggcatcctcctcctcctcctcatttcatagcaggagctgagcctaagagactgtcagtttcccacctgggatcagagaggccctgactgcacagtgtaaccatctggagggctttttttctttttcaagacagagtctcactctgttgcccaggctggagtacagtggcccgatcttggctcactgcaatctccacctccccggttcaagtgattcttgtgcttcagcctctcgagtagctgggattacacgtgcgtgccaccatgcctggctaatttttgtatttttaggagagaccgggtttcatcatgttggcaaggctggtctcgaactcctgacctcaagtgatctgcccgccttggccttccaaagtgctggaattacaggtgtgagccaccgcgcctggccccggagggcttttaaatcactcagatgtgtttgtgtgatgtatatgatgtctgcaacttactttgaaatgcatcaaaaaataaaatggataagtgcatgggtagatagatgtgtgataaaggaaatacagcagaatgttggtgacagaatctagatggcgggtatacaggtgttcactgtgcagtcttttaactgttttgtatgtttgaaaatattgataataaaatgttgggagacaaaaaaacatggatgcacaggcccaaccccagatcaattaaatcagaatctctgcaggtgaggcccaaccagctgtattttttcaaagccacccaagtggtctgatctaacccatcatttctctctgtgtaccaagcatcacctgtagggtacaggtaccttacatcagtggttccccaactgagtgtgcaatagagtctggagggctggttaaaacacagattactgggccctgcccccagactttctgatctagtaggtctggggtgaggcctgagaatttgcattttaaacaagttcccaggaggtgcagatgctgctggtcctaggagcacattttgagaagcacttcttgcatctgcacagcccaacacagggtgaggaagtgatgagagtgtataaaccacatgctgcatctgtcagcagaggaagccattggctgcgtgagggtcagaaggagcttcatagatgagctggcatttgggagagggcattctacagggacgggcaagcagaagcgaagggatcgaggtgggcaagtgcatgacatgaagagtttctagatttgggatgtgttgaggaggttggatggagggggaatggccagagagggggcaggagagggagtctgaggcagatggagagtccttgctatgcagggtgtttggatttggttgtgtaggcagtggggagctggtgggggttttaagcagcagagtaatgtgaccaaatcattgctgtagactgtgttctggcagctttgtgtaggatggattggagaggagagatgaaagataggaagcgtacttaggaggctattgtgagcgtctggagagagagatggaaggtctgcataatcacaacactaataatgatgataaaatagtgactgacatttattgagtgttttctaggtgccagacagtgctatgtgcttccgcaaacattatcttttaatcttcacaactgccctgtgtggttttacggttgagagaactgactcagagaggctaaaggagcctgggctgggatttgagcccagggctgcatgttttgtggtgtgagtgctcagtgtcgacccaggctgtgccgaggcaggggggtggtggggaggagaagtgggagagcaggtctctgccttggtctccgcctcctcaggcagacatccgtgttccctggctcaggggctcatcgtccttccttcctctgccaaggctgaggcgcagctggacaggggagcatccatcacactcctttcccgccagccagcagcggcagctctcctggcaggcaggggatcagctgtgcctctccttactccactgctcctcacccctggacccagggcccaccctccatctctccttgtctggtgctgcccacgtctgcctgcagaccacacctgtgagcacttgactaagtcttctggtaagaaaatgacacggtttcccactcccttccatttctctgctgtccttgtgggcctgagcagaggacacttccaggctccctccccagaattcttgcatttcagatgctcctccaacaggcctctatgaagataactctattccagttccattgtggaaaaggagagctgggggtgggggctgggcctgcagggtgagtcatagataaagtcctgcaaatagtaagcctgttagctgttattcttattataactgagctctatgaatatggaacttaaggggcttggcaccaatggccaggtttaaagagagacattcattaagcactggaagggttttgtcagcccttgaccatctttctgtctccaagaagggcttcgtttataccagatcagaaagagctcactgtgcttctcttaaagacccccctccccttctcttcccaccccctggcccagggctggaactctctattctgcccacaaccaagccccatggcctgctcagctcctggacaccatccacctgagaagtcctcaggcacgtgtccctgcctcactctccccaacccatatacccaaacccagaaggaccagtcagctgccttgtaggtgctcagggctggggcagcagtgaggctgcatcattgcacctgcaaagaagctttgaaggaatgatctggatctcaggcatgtgcgcaggcgagtgtgcacccacgtacacattcctatgtctggggcagtagtggtggtggagtcccaggcctggccttcactcagacctgtctttcacctgtgtgtgtgcaggagcgagggggctcacctggcaatgggagtagggctgggagcagttcccagaaatgcttctggccagggctggacagtgggtttgtgctggtccttgttctttctcccagcctccactctacatcagccaaccacctgccggcttctccctccccgcctgcaagcatgtgtcacatggcgggagcagatggggggtggtgtgcctgggctctctctcccctcagccagccatttgctctccagatggatctgggcactgacagggtgtacattcggggaacggcagcctgctcctagacggcccgaggctgtgccctgctgagctggaacacaattatgttctggaagttcaggcatctgagctggcaggacccagagtaccaggtattgggcctggtgaagaagactcacagccctccagaaggaaatcctgaaagggtttaaggaatttctccctaccttctcctccctctctgcccttccccactcccatacctctgcccctctgtcctgggctccacacttggtgggttgcagattcccagagtgggacagggaggctccacattgcctgccctccttgggaatctacaaccccccaagtttgcagcatcgttcagctccaacacagaccccagacactttcccttcactgtttcacttactgcacaaacaccatcataactgcgataacataaaccaaaaggaacaaaactctgtccatttcacgaccttcacagatgaactggcctcagtgttctttattcccttctggtctctgttgacgttccacccctcctcactcattttcttttttcctctctaaaagaggaaagggagcagactgcggcaccctccactgcccgccaggctggaccccactcatcttggggtgggggtttgaggttctgcttttggctggtcacatggcagaggctgagttggactagcttatgtcctctgggttagcagctcattggctgcctctcctcagggcactagaggcccagggccacttggcacctagactagaagctaggggtgtaaagggagagaaggacataaacatagcctgaacacaggctggagtcaggggctcagactgggatgatagtccatcatttctctttcctgccccagtctcaatactgcccactccccaaagagagtattatgagtgatttttctggagaccttgggatctaactatggttacctcttagatttccaaaacaaggtgtatagacactctgaatgacctgtcattaatctgtaggggttctcccacagtttccaggctcccagctcccagtggctggggaccttatccagtgtgagccatcacggcttgacttggggaataagagtgtttctgggagcctggataggctgcggggtgggaaggcagacctgggctaacttcccactctgagcatttggatctgtagctgctctcagggcctctggcttctcatcagttaaatgggagccatgacaagccttctgcagacttcacagggaatctgatggcatcgtggttgtgaagagtagcaaggacccatccacatgaaggggatttgcatgattcctgacactacctttctgctggtcacctatgctgcacccagcgcagcatcccaacagctcttaccgactcaggtgggggtctctctccccagtgctggcccagttacatctgtgggatcatctggagccagtggttaaagggctgagtaaagtcaaataatagcacagataatgcaaaacagggtgtgattcaagaacaatttttaattttaattttatttgactcatatttcaagggtgactgatccaggctgagttttgcacacacataactggatgaggggagagatctggagtgtgccacatgccagggaaaagggctggcatgctttatacatgggcagcagaaccatttgtgttaccatgtggcttggagttgcactgatttagatacatcttaagtcactgcacactctccataacattagttcctgactccaaaaagtctgtttctgctactttcctggaaaagcaggggagaccagtgttagagagagctttcaccaactgtcggcctattccttgtcaccacagacagtggagtaagagggtttaagttgcagcaagaggaaaagtaagtcaggtagtggcagagcttcctacctggagcagtgagggactcctcaaaactctccacactggagaagtgacccagccatggtggatcgatcagcggatccatgtggacaacaagcgtttgttgagtgcttgttccgctctcagtgcacaagtatctcaccttcacaagtctgtgaagaagttgttatgattgctgttgttgttgctatcattattctctctgtttcaaagagaagggaggcagcggggcccaaggatgcagaacacggtgcctgttgctcccactggaatcatgtctattgacgagttcaggagtggctgacatcagggcttgcaccatggcttcccattccaagtccatgctcttctcaccgtgccgcacctgccttccagaaagccttggggaaggctccttgggcagaggcccaccagcacccatgcagcaataagtgtgtgaacaccttccccactgggcattcaggaggagagactcactttcattcattcaatagacacgggctgaggatccagaggtaaataagaccttattcttgctggctcttggcagacctgttaatatctttgcttcatgccccatgatggatttggaaaacatttccgatcaattacctgaagcagaattatcacctgccacatctcccttctcaaggctggctgctttatgagtgtctacactttcaaccatgagtgggcacattagtgcctttggctaagagcaaagattcccatagtccctttggttaagagcaaagattccttgcactttgttccaccattcagtcattctctcattcaacaaataattcagcgtctcttatgtgactggtgctgggttagcagctagggatatagcactgagcaaaacagacatggttcctgccaccagtttgcagacattaaccagataattctcccatcctgctctgatgtattcccaaggactaaggtggtttgttcaggagtgacttcctcaggcctggcacttccagggcactatgctgccccagggtcagccctcctgtctcctgggaattataggccactgggtagtgctccaggaccaggtctttattgatcattccctttggaaggaggcaaaagactctcccctctccaagccttctggctcttgatccagcccttcctgtgaaatgcccctgatggacaaacttagaagggtccctaaagggaaggctattctgctcaacccccagaaagagggtatattttgcaaagaggccctgtttctctgggcagtttgatgatttgggaaaagcatgggcactggagttaggctgatgtagatttccgtcccagaattgtccttcctagctgtgcgaccttgggcaagtcatgaacatctctgtgccttagatcctcagcagtaaagtaggggcaataatacctaccttgcaggaaggctgtgatgattaaacgagatgttcatgaaatatttgccatttaatagatgtgtctcaccctttcttctgacttttaacttctaaaggacatgattacctcttgagctgacaccaaaaagaggcttgcaaatactaaaaggtaaggaggtgggaagctctcttattctctagctgctgggctatagcagtggttcccaaagtgcggtccctagaccgtaagcatcacctgggaacttgctagaattgcaaaatcttgggctccaccctagattgactgaatgagaaactctggagaaggggcccaacaatcggttgtaacaagccctccaggcaattctgatgcacattagtgtgagaaccacgaggctggagactgcaatccagttgtcagagggccaaattctttcatagatgtgttttgtttggcctctgtcatcagctggagctgaggagcagctgtccctgagaagtgatggtgccctcctgaaggggttcacagtcctggctctgccattccgttttgtgtgacaccagctggcctcacttggctgcccacctgctgtgggcacccatatttgcagcccgggctctaggtcaggggcaagtgtggtttctgagccctagagaagtagcagttctgcttcagctggtcctgaacatcagccgagacacggagccacccaactctgcaggaaataggaacagggtggacagctttctaattcctgaaaccagcagccaggtcctgctggttgagcttcagtatttggcttgaagtgttgtgaattcccagcacataacacacacccacattcaactgtaagtccaaaaataccttccacagccaaatagagatgattcttacattccccactacctcagattatctgcctcgctgctctctgccacccccgctgttggcacaaactaataagcagtgactttccctgcgtcagggaacttgggaaagcagaaggggccagtgacttcaacacccgcagcagtgagtgggacacagaaatatcaatgcaggtgggtgccaggaaggctggagtgacctaggggctgtgatgtccatgaggtggagcagaatgggagtggagctgggagctctcattggagacactggaatagagaattacgatcagaggccctggcagtagcaggcatactgaccaggagagagaaagaaaatgcatccaggacacagcacgggataggacgcagggaggaagctctgggcagtgggagaggaactgggctggactcagctttggatacagggaatcaggaggagacctgggtggtatcccttctctgtgcccccacagccaggagagagcaccttcaccttccttcctggtgaatctgtctccaaagcatccctggaaggaggtgggaagcaggctgactaaaagcatgcgctttggcatcaaagagatctgagagcagatccggctctgccacttctggtgtgactttggacaggccacccaacctctctgagcctcagtttcctcatctgaaaagaggcagtaaagcttattttatagccatatggtgaggatgaaatgagatcacatttgaaaaataattagcacactgtctgtcatagaaaaaagaacaggagaaagcttagatataattaaaattattcgagcacagaacccatgtattttcaccagaagtcctggtatctgggatttcacaagttggggatcattggtgagaaaaattgagtcagacgtaagcattggtaagtgaacagaagatgttagaatgctcaaaagaggggatccccaaagagagaaaatgacctgccccaagacttatggcccatagcctttattaggacccttgaatgttggctcatgtggcagaaaagatgtaagaatgtcctgacagtgatgggtaccaaacccagctgaggtcaccaagagatgtggctggagtaaagctaccctggactgaaggaggaagtgtcttgcctggtgcctggaggatggacaggatgacctcagatgcccacagagacattattaaccataggaagatccaaactgacctgatttccactgccctttcatttctactggaaagaaatgtatttccagtagtgttggggcgggcgttggagtaggatacatatagtgcaaacagctgcttctcccacccttccaatctaagaggcacagcaccttggggctggatccccatcctatcccgctactaggtcacccccaaggcgaccgtccctctctgactcaggttcattgcctctagggaggcaaaccctgaaaaaagagcctggggttggtgatttgcatccatgaatttctgtctcttcacctgtgtaaatggtccagaggagaataaagcagaccataattatcgcaattataatgagagaggagtggcatagatgcagaagtataatccaaattaaactgtgaaggaggtagctacatcacctcccaaggccctttttacactaatactctgtgagtctctgagcctaaaccatcctgggggcccaattctgataatgtggtgacatgaagaccaattgatttttggatttacagttttctgggaaagtgttgctgggccttggagcggatctgcacattttctggagagaaggtggtagccggggaggtcaggagagcgtggaacacgtgctagctctggtcaaggctgcagtccttgggcgggctgagggctgggcccggtgcatggtctcttgtgcacgcagagtgagtgagagggcagagccctgggccaaaagagaagtctgcagagcttagtcttgacaccagcctacttcttcccctacctccttctcagtcctcctctgggaaggcagaaagggcctaagggcctatctcaggccaggtttccctggaagaagcaaagcctgagcagagattcttgagcaagtgactgagcaggtagtgtcctccagaagaaccagggtagagcacaggatgaggccaaggctacatgatcccacgatctcatgatcccacgaggagccctggagcatgaatggcaccacagaatccattgcacctggagatgtgggggctgggctcctatactcctctgtcagctggtgattacccaagagctttggaatggtggtgagggttgtagtctccaggagtctgcactgggttaagggcaggcctctggagaaggttgcaggtgtgaaccattaacagccagtctggatgggtgcacccacccacaaatggggcaggcaccaacagcacctgctactctttctctcctaggaaatgccacgttaattcaactcgagaagatccttgcttacttctgaagatagtttagaagtcgtgtgggggtagttaggaggaggaaatctaaggtccttcaccaccctaaaatctacaagattacattcaaaagtgaataattgctgcgataattcttccaagatttgtcacatttaaaggcttattataataaacattcttaaggctgggcacagtggctcacgcctgtaatcccagcactttgggaggccgagtcaggcagatcacctgaggtcgggggttcaagatcagcctgaccaacatggagaaacccccgtctctactaaaaatacaaaattaaccggatgtggtggcgggcgcctgcaatcccagctactcaggaggctgaggcaggagaatcgcttgaacccaggaggcagaggttgtgttgagccaagatagcaccattgcattccagcctgggccacaagagtgaaactccatctctaataataataataataataataataataataataatagtaataggccgggtgtggtggctcacgcctgtaattccagcactttgggaggccgaggcgggcagatcacgaggtcaggagatcgaaaccatcctggctaacatggtgaaaccccgtctctactaaaaatgcaaacaaaaaattagctgggcgcggtggcgggggcctgtagtcccagctacttgggaggctgaggcaggagaatggcgtgaacccaggaggcggagcttgcagtgagctgagatcacgccactgcactccagcctgggtgatagagcgagactccgtctcaaaaaataataataataataataataataataataaacattcttacaatgaatttccatgctgagttggcactcccatcacacaaaactgttgctgagagtggttgtttcacttaaggtgacccagctagtcaatgtagtccatgtctgatagtacaatttcaggcagtactacagacttctgggactattctttttaggaggggctcttctctgagcaactctttaagtcacaaacctctttgcaccctccaaagcatcaacttcaaatgaaaacatttatcaactgtcttcagtgttcaagacactggtaggtcctggaggctgaaaaaggaagtggtatctgcctcccagggtttgcagtcaaaccaagagccatatttggagcaaatggggaggtttgattaagtgccaaataagagtgtggggggcatcatgggaagtggggaggaggagggaacttctaaaggggagaggtgttccagcatggccttctgagaagggtctggaatcagagagattcaagttagctgctggagggtcccttccttccagctggttgtcgctgggccacctgtgccaagaagtggcacatccagccattcatgtatccacacaaacctgtgtcggctgagctcccactgtctggcagactctgagaggactccctcagagctcccatctcatgtagccatggcccactctactatctgctttccagttcttaatcctgggtcctgggccatccagattgggaggcgctctgagcagcatgtctgctcttcactttaccccactctaattaaataagtggttacttacttatctccctagagagaagaggttttagggtagggagtgtatcacttaggaatgcttttggatgcatgtaacagaaaacaccatctacaataactttaaacagagagattcatttaatcacttcacaagaggtttcggaagtggcagcagctgctggtctttgctcactggctcaacagcatcaaggtattctgttgccctcttggcttgtctcttgtcttatggttaaaacagggctgctatagctcaagacatcacattcaaatgcaagggaggaaggtggagaaaggaaagggattggtgcccactgagtctatctcttgtaaggaagacaaatgtcttcccagagcctgtagcagacttctgcttatttctccttggtcagacctgggcacctgtaacttcaaaagaggctgaagaagcaagtgtctcacctgaggctgggaacattgccactctgtgcaatgtgggagtttattatcgaagacaatgggggaatgaatttcagggaggcaatcatgttagccacaaagagagctggggacttccttgtataatccgaggcactgagctcctgcccccagctcctgcccaagaaacttctggacagtccctaccactgaaacgtcaagctgcttcttcctagtctgtccttagatgaaccttgagaacattatgctaattgaagtaagccagtcacaaagctaccctactgtcctcttccctccagcacatggaatcaaacaccagcctcctcaccctccctccctgactcagccaggaggctgttctcctggtttctgctcagtttcacccactgtggagcccctctgggaaagttaaagggagggagaatgaaagaggagggagagtgttaattaaacaccagatgtttaactctgttaattaatggctctgtcaccctgagtggcagcagccttctcttctctgtctccttcaccctcactattctctttttctctggagggccttgagtttgaagctaaagaactcaacatttgttcaatggggccttgagaccagcaaagggtaaagggagaaagctggctagggcaacccaggaagagcgggttcccttgtccaggagggaggcatggacattttggcagtaggaatggaaagaaggaacagtgggagagagagaccaaagcccagaggtcacagagagacatgttttgtttggtgcacatagggatttcaaaaaatgcaagtggttgcaagcatttaaacatgggaaaattttcacataaatctagatgtgcagatcttctttaaaaataggcaggtctgggcctgtgtcctcacacagcaacagttagctggtggaaagtagagctgcgtagctggtagctgtcctacccagaagaaacgtgtgtcctcccatcctcctctgcccccaccccacatacttggctcatatgtcacatgtcacctgccatcccatctggggttgggatccactgaggtacaggtgccaggactcgacaatgggttgcctataggagaagacagagaggagagcctgagaatgttgaaacgtgagtcaggatatttggggaaattgtaggaccaatgacagagatgaggaacatgggaggagcaggttaagggagaaaaatggcaaatttattttgggcaggctgcagtagtgatgcctggatgacatggagacagaggcggcctggtggtctggagtccggaagagaagggctggcaatctgcggagctagtggggcaggggtggaagtggaagccctggggagagagggagggagggaggctgagaccacccagtattggctacagtgagagaagagggaattgaggatagaaactttgagaaccacacatttgggagaaagaaccagaaagaaaagttagggccaactgagagggtagaaagaacctggactttgtaacaacagagaagtagaaacagggttcaatatttttatggcaccttcctctatatgatctgttttaatgcccaagtgatatttccagaaagccaagggagtcaaatgttctgctcctcccgatgccccgtgttctctgtctcccttcttatctgctacagctggctccccaacgacacacaaaatcagccacttatatcacagccttttaacctctttcaggccatttggattcttatctctattaactttagaataaaatcagccacttatatcacagctttttcttttctttttctttttctttttcttttttttttttgagtcagagactcgctctgttttccaggctggagtgcaatggcacaatcttggctcactacaacctccgcctcctgggttcaagtgattctcctgcctcagcctcccaagtagctgggaatacaggtgcggaccaccacacctggtaacttgtttgttagtagagatggggtttcaccatgttagtcaggctggtctcgaactcctgatctcaagtgatctgcccacctcggcctcccaaagtgctgggattacaggcatgagccactgcactcggccagtttggattcttatctctaataactttagagggaaaggcttggtctgtaattgaaagtttcattagcatcccagaaatgacctgctaggtaagcaatagcccctggtgctgtctgctcatctcgttgagtatgtaggagggatgcagcttctgtgaccaacacagacacacatacgactctttgccaccctgaaaagtctctgctctctgtgagtggccaaaagaatggggctttggggtcagagtgcccttgggccagatcggacctgtagccacccattgtgacttttccctcctctctagcctccctagtttatacacgtgtcaaatgagagtaagggtggtgtgtgcattaaataggataattttcatggggggtcagggggttggggaagctggggcagagtctgagcccatcaccccagtctgtggttctttctgtctccctctgacaccaccagcacagaaagcaaggcagcagatgttactggtctcacttcatttccatagatttacaagcatccctttatgtgttactgaaaaattgggtgtaaatcctattttaggaacacagtggaactcattacttaaagaacactttggaaaatccttttgggaagtgaataatgatcaccttgtgtgccggtgttgatgaatttctttttgttgtagtgcagttcacctggaagttcttcccgcaatctcccctttccattttgtggccgtcctctttctcacgggacagaccctgttctcctttcctgtgcctgtcatttccacatctctgctcctccctctccaccacccgccgggcctgcatgtcgggcttcccgatgttcctccagcagtagctccttcttccctgagaccatgtggccatgactggccgggatccatttgctggctgctactccttcttcagaaattcagtcacagatgagtctctggatgccagaaatgtgtttgccaagtgggaatgactgagcgggagtccctagggtgagtgtggcaggcagaataatggctcaccaaagatgtccatgtcctaatccctagaacctgtgaatatggtgccttacgatgcaaaagggaatttgcagatgtgattcagtcaaggaccttgaggtagggagattatcctggatgatctagatgggcccaatgtaatcacagggatccttaaaagtagagaaccttgcccagctgtggtccacgggagaggcaacagcggaagaagggttagagattgcaatgtggctagctttaactatggaatgtgggcagcctctagaaactgagaaaggtgaagaagtggattctcccccagagcctccattgaggaatgcagtcctgctaatgccttgattttagcccactgagacccatattggacttctaacctatagaagcttaaggtaatacatgtgtgtttgaggcctggtgtggtggctcacgcttgtagtctctttgtagagagagaggcaggaggacactttgggaggctgaggcaggaagctctcttgaagccagaagttcaagaccagcctgggcaacatagtgagatcacatctacaaaaagttttaaaaattagccaggtatggtggtgcaacctgttgtcacaactacttggggggctgaggcaggaggatcttttgagcctaggaggtcaagactgcaatgagctgtgatcatgttactgcactagagcctgggcagcagagcaagaccccgcctaaaaaaaaaaaaaagtttgtttcaagccattactgtggtgatttgttaaagcagcaccaagaaacaaacacagcagcaaccatgtggtccctggggcagtctggcctatatctgacctcatctcttttgcctggttcatcatgtatccatgacttacccaaaattctcccccttcagtgagtggttccagctggtgcctggcctgtgtctcttggatgccctgtggcttcagtccgtctcctgttgcccaccacctcgtccctgggccgcctgataccccagcccaacagctaaggtgtggatggacagtagggggctggcttctctcactggtcaggggtaagtgtgcccaggggagtgtggggggctgcagcaggtaccagactgaggggagagcagggagaagaccccctcatctggggcatcatcagcatacctcctaggacctcagtccactgtatttgagcagctcttcctttttaaaaattgtggtaacatatatataacatgaaattggccatttaaccctttttaagtccacggttcagtagtatcaggtacactcacattgttatgcagccatcaccaccctccatctccagaacacttcatcttgcaaaactgaaactgtacacccattaaacaataactctggcttcctcccgccccaggcaagcaccattctactttctgtctccatggatttgactactctaggtacctcatataaatggaatcatgcagtgtttatcttttcgtggctggcttacttcacttagcataatgtccgcaagggccatccatgttgtagcatgtgtcagaatttcctccttttataaggctgaataatattccattgtatatatctttcacattttgtgtatccatttatctgttgatggacacttgggttacttctgccttttggctattgtaaataatgctactatgaacatgtgtacaaatatttcttcgatatcctacttctggttcttgtgggtatatacccagaagtggaattgctggatcatatggtaattctatatttaattttttgaaaaacctccagactgttttacatagcggctgtaccattttacattcccaccaactcattttaactattttcaagtatgcggttcagtggcattaagttcattcacaccgtcctgtaagcatcaccaccatccatctctgtaggagctctttgaattacagagaactaactctctggatgtgaagaaacttactgggggaagtgagtagaaatgggccctccccacaaagatttatgctgagcaactgaattggtgctggaaatcccaagaaaatccaggcctttagttggatttgctgcctgtttttgagttgtgggcatgttttcaaatgcagttttcattttatgcagcaactgaatatctgatagtgaaatgtttccacggagagagcctgcccagggggaggaggaaaaggaggctactctaatgaatagataagcttgatttgcgtctggcgacatccttagcatttaatttcagcaattaaagtaggcaagtcccctttgttttctttttccttgcaaaaacaataaaacattacagaatgtttggtaaataagaaacaaaatcctactcatgatattaccttagtgaaaccaccaccaccatttgtaatgctaatctgtgcaaggcaagaaccaaacatgctattcaccttatttcatttaagccacactactactctatgaggcagggctctggttctccccgatggctgcatgctctctgtgcatgcatttggtccatcttcctccacatgtctgtcttctacacaattgccctcacgatgttcacactttgttttcccaagtggtgtaaacattcttgttatattcttcttgttttcattccttaccgtgtgttgacttactctgtttgtaggagcaagaccagtctctatgatcacaaatacagaagattatagaccatgtttatgagattttcgccatctgcaaacattccctggagtggcctgggctccacccacatggctatgtcaaataatgtcattttctaaatggctgtgtcctgtgtggtgtgctggcattgagtaaggggcagactcctgagcccgactgcctgggtttgaatccagcttttaccagtctgacctcatgcaagttacttttaactggtctgtgcctcagttttcccatccacgaaatggcgacgattacaatacccgcctcacggggttattgtttggattaaacggcataatataaagagcatagaccacttctgggtacacaataacatggttgttattgttgttgtcactgttacttaatcctactattacttagtctctgccgcgagctccctgcccaatcttgctgtctcctcccatcctcagtttcttcatctataaagtacagtgctgaaccatgtaatctgtgtcagagcccttcttgttaaacttttggtcatcaccttgttccttttatcttccccattgcagctggagggatgtgggtgggactgcagggaggactgccggaacactcatgacacacatgcgtgacttggaggtttctaggaatatatggaagagagaagaactcagcccagattgcagaaagcagaggcaggggatgaagttgcccctgggagagggcaagggggtgggggtaggagaggctccccataccctccccccatagattttagagctaaaaagtgctaggaaggctttcctccctctgccttgcctctctggtccaaatcttccctctgggccccagtcccccagatggtctaaaagggaagaaaagaggaaaatccgtatcaaatctgctctattcagagcaatgggaaggcatctgcatctcaatcttatctttgtgctgagttgggctaagcttggccccacaagtggtgagtgatgtgtgggtgggaagatgccttcaccacccccacggagaagcccacttgtgggccaccatactcggtggccctgggcaggggcaggagagggctgcccccacaatgctttcccttcctgccaaactgcagacagtacacattcttccctgctcttggtttcccctctatttcctcttcttttattttccttctctttttctccccctttcccaggcaggaagccaagtggagactttgaatggaggcaaggatggaggggacctggggaagaggactggcctgaatcaccttccccaaaggtcctcatggactgagctggaggtggggactaaaggaagcatcgccttccttcccacccaccctggcccctggctgtcaggcctgggctgggggaagctgccaggtggctgtcatcactctgggcttggggctccagagtctgccctctccatctggaacctctagaatttgtttctctggagccattcaggacctgggaaaaactgcctcccacagcccaaattcacaggaggctggtgtgcagcaggaagtcagcttaataatttatagccagaaagcactctccctagtaaggaagccaactcagaaaaccaaattaaactgggagggctgcttggagagcacttggagccagggctgtggaatgcaacgataaggctggggccagtttgtcctccagggaggatggtgagtgtagcagcccagggtgtgggcttatgcagcagacagtcgcggattcaaatcccagcttcactggcagtggcagggggaccttgggcaagtgcctcagcttctagaatgatgcttatgtgggcacctcttggccttcttgcaaagctgctgtgagatcttgcagggaaagagcttacttagcacagtgcctagcatgctgtcaatatgctccaggcatttgtactcaagcccccatcttttagggtcgtaggttgtctttttcttcctgatgacaccctttcatggttttttacactaaaaagaaaagaagtgtgaggttaccctggagaggacctccttgtcggccgcagtatgagtggccgtgctgctcctgcctgggtgcagctctgtgggccacacggcttccagcctgatccctcattctccctgcttctgtctggagccaagccccacagttggactggggaattctccacaaggctgcaaattgggctgagatccagctgcattctgggtgcaagaccagcttcccaatgtctagagttgccctgctgacaaatggcctgctctaatccacctgtccccttgctcactgccaccaaacttcccaaagcatgcacagatctgaccacatctttctactgtcccaaactatccacaaatcctcctcttcagcagagggaaaactcctgaatctttaggtttgtgctcaagtctcactgtgatttggcctcggtcctgctttccagactcatctccctctctgcctctctccaccagcttctccagattgtccaaggataggccagagccaagtctttcccctgctgtgccctctgtctggaatgctcttcgcccctgatggctggggaagctccacccttgttcccttcaagagagttccgccttctacgtgaggcctcttagacacccgcctgactgcagcccgtcacccgctttcccaggacgttttttcccttttagggcactcacatcagctgcttcccgctgctctacccatgcatctgtcttgctggacgttgcaggagagccggcccgatgcatcctcgtgctgaatggaatggtaccagcaactcagctgctacccaccccggggtggtctgggcgatcccctgtctgaaaacgggggagggttcggttgtgcagggggcacctgttgggagactggtttgcgctctgtgggggaattcagctctgatacacactctcttagcctctgtctccgtcatccttcgcccctgagcagagggcaccggtcgctgtgtagctgcaggcctcttgattgctccggccttggctcctgcccccacttctctgcgctccttcactgtcactcgccaatttcactcactccccctgttacagcaaaccctcttcctaatctctgtgctgggaaaatgagcccaggagaagtcccatacaaggtggggaggcctcagggggcgtgtgcatgggcgtgcattctctcacacacatgcgcgtgcattcacacgcctccaggcaccataagagtgaccccaaacccagaacccacagggaactgggacagcagcgtgagagaaggcaagagaagctctggccaaagatttgggaaaatgctttcttcactgctgaagatttcccaaaatagcaggagttggctggtgctgcatctcccctcccccactcctagagcaccctgccccagctccaatgccaagcaggcccgaggcagggcaaggcactggccatctgtgcccccttccccatccagacccggggccatgggtcgctgtctgtgctcactggagacatgtctcctctcctcttttagactgtaagctccttgaaggcaaggaccatggttttgtcttgtgaacctccctcctccccgctttctcatctatacagggcccagcacatagtaggtgttcagtaaatgctcagtgaagtattatgtaaatgaatgaacagatacttaggtaactagtggaatatgttttacatatactagtaaactaatattaatggatttcataaagagcctactcggtaccagacttagttctgggtgtatcaaagcagtctctctaagcaagaagctattaaccttatttcacaggtgatgaaaccaaggtttgcaaccaggtagagcagcctcccaagctcagggctttctatgatactatacaaccctcgggataattggattggctatgcactgctggtggggaaattctggaattattttaacatcaaatcagacagacgtgttagaaatagaaatttctgtttgtcttgggagtatttggttgtacgtatgagaaaccaaactgtatgggataggaattatatttagttaatataattgagatgtgaaaagcaagggcttaaactagttgagactgtattattcgctaataataatagcacttatacaatgcctactttgtggcagatgctgttctaggcctgttagataaaaataacttatttcatctccacaacagctgtgagctgggtgttattattctccccattttgcagagaaggaaacgagagacacagcaagcataggaaaggagtctggaggtagacagaacagagctggctccatcttcaacattccaggttccacctagcttagcatatggctaaaggtcacgtcctttgtttttttagagacacggtctaaaaaaaaaaaagaagaagatgatgactactcaggtaggctcaacacctgcaatcccagcattttgggaggttgaggtgataggatagcttgagtccaggagtttgagaccagccagggcaacacagtggactctgtttctacaaaaaaaaaaaaacaaaaaacaaaattgcccagcctggtggtatgtgcctgtagtcccagctactctggaggctgaggagggaggatcgcttgagcctgggaggttgaggctgcagtggctgtgatcattccactgcactccagcctaggcggcaaagtgagaccctgtctcaaaaaaaaaaaaaaaaaaagatgaccaccccacagggcccatatttttctgttccagtttcccctgcaaagactgacttgatctgctttgcaatccttagcatatggctaaaggtcacttaccagctgcagatggctactgtggcaccattcctcctatctgccaaccactctggaaaaagggaagccctcttagagcacgtccctgtaagccccactgacaacctcctcattcatctcatgggccacctcttcctgaaagactaggaaaagttttgagcagggcaggttgcctcctgccctcatgaagcagaggctcctttagaaaggaggaaggcgaggacagactgaggaggcaatgcctgttggcaactcctagtctgacacaactccaacgggattaagtaaaaacgggaaattttattacaagggtctgggagtgggggtggctcatggaagtagaatgtatttaaacctcaggaaagggctggaacagggaactggaaagctgtcagcatgcctctgtctcctgtcactggtctttgtcttcagattgtcctcagctcacatggcaggtagcagagaactgccccacggtgggcacagaggctcatgcctgtaatcccagcattttgggaggctgagggattacttgaggccagcagcttgaggttacagtgagctatgatcatgctgctgcattccaccctggttgacagcagagtgatatcccgtctcataaaaacaaacaaacaaaaaacagaagaatatgaccaccacacacatttacatattccagtttcctctataaagactgacttgaccttgggggttcacacacccacattgctgtgggagagacctgaattgtctgttttgatcacatgaccatcctggtataagcagctatggctgggatggggaccccatggtacatatgaggctgctggggcctacccctttgaccataaatggaggggagatgatttccatagatagggaattcttgggagttgggaagtcacctcccaattctagaacttgcctcgaaaagtcagaccccataacatttccagtgatatgggaaccaatcactcttcttttttcagtatgatacctgcagtggtgctgaaatttgcaaagctgcaggcatagactccttgctcttgcctcacctggagcgaaggtaattgagtagaggagatcccagatctaggccctgttccatcctttccccacccgtcatgtcctgtccttcccttctctcctgaaacagcagacagacgtgctgtgctggggccgaggtggacacagtaatattaatctagcaattactgattcaagagggagttggaggacatatttacataaaaatctaatgagaatggaacttctgctgcagaacttaggtaccttaaggcctggggttcagggtaggagaagaggcccaggatatgctcctaattcgggcccctggagctcaggatctggccacatacagggctaggcctggggctctgaagctggtggtcagacctggggcggggaggcagagaggcctgggaagggagcacaggttagcgggagggtgggaaagagtgaggggagaggagggcaattgtcctggcaccttggctgttcttaggggctgacaagagaaaagccccagctaagggctaaaaagctgttatttgcatatgcattgagtatccctaatgaggtgttctatcagtcagggtccccccaggaaacagatgacatactcacttagggcaatgtgagggcagtttaataaaggaactgtttacaaaggtgtaggaagggggtttgggaaccatatgggataactccctgtgcagtacgcaggggctggtaagcaaggaggcggcaccacccctagttctgaagggaggacagagggagcaatttccttcccaagcctggaagcagacgagctctggtctgttgagggatgcagctgtgctcactctgctgccttctcctccctctgttggccaaacccaagcagggcctccttggatgcagttcccccacatccatccacctccctgctggcgcagagcagggaggaggagagccagggcaaatgtggaggtgcaggcagagggcatccagcataagtgtcagagggcaaaaggaagtgctccagtccctgttcctctttccccagagcaccagaatgactcatgctagtcgatcactcagtgtctgccaggtactgccctaggccttttaaaggtaataactcctttcctcctcacaactgctgaagaagttgttgttgttattatcatccccagtttggagaaactaaggcagagaaaggttaagtgtttttcccagagtcacacagctagcaaggaggaggactaggactgggcctcgggttgtctggctccagagatttggccttgccctttgaatccctcttccccagccctgtggccttgtttgaggggccaggggtcaatgtcaggaaaaggggttggtgggctccaaggatggacagcacggcgaaaccccatgccacaggacggacccaggctagcactgaggataaattccatgtgagtgacggtgtgaaaaatcattcaagggagtaggtttggatcaaatctccctcccagagggtctctgctaagaggaatggttaggcccttctggggaggagcaaagtatgaacgagtttgagcctgaggataaggggatcaaaaaggtgctgtgggtcctaattccctgtggggtgcagaccagggagggagtggggggagaaggggtcagttgggtgctctggcttcgtgctgttatttccttggaggcttgcagccattcagtgatgggtattattccatttcacacacacgtgaagaaacttaggcaggaaaaaagtaatcctactgtaattttccagacctggagtaaggtaggggcagtaggaagggaagagagaggaagggttggggcaaaactcttagagcaggaaggagccccagccctctagtcctccagcttctaccctgggagctgctcatcagaatcacctgggaattccatacctgccagcccaggactctgccccctcagggggatgattctgattcaccccagctcctgtcagggatccctaatctagttcaacctttcatttcattgctgaagaaaatgacaccaaggaggtcactctgggttagagacctttgcgagacgtagggtcagcggggcttggtgacatgttagacagactagcgaaggagagaggaggtggaaggcgacaagttagacaaatgttagggcttttccaggagttttagtgaacccaaactagttgtttaaaagtttcttaaatcttaaaactttattgagtagccaatatgtttacctggtcacaaatgaaaataatataaaaaggtatttactgagaagccttgattcccattttgctacttatagataacctacaaagattagttttgttttatttttctagtgtatatcaatgctaatataagcaaatataaatacatgtgttcttatttttactgtcttattttcacaaaagttaccatgctaataagctgttctgcatcttgcttttttcacttttttgatacggatatttttccatatcaaaacctacagaaagcctgggcagcagaacaagacccctccacttacaacagagcatgcccctctagccaggcatgatggtgcatgcctgtggtcccaaccactagagaggctgagctggaaggatcgcttgagtccaggaggtcaagactgcagtgagccatgatcgtgccactgcattccaacctgggagacagagcaagaccctgtctctctaaaaataaaataaaataaatagagaaaatcttcacactttttaacagctgcataatattccattgtgaagatacaccctaggttatttgggcaatctcctgtttctgaatatttggttgttttctgcctttctgttctttcaaaggatggcacaatgaacaatctcattcgtaagtcactttgcacatgtgcaggtgcctctgtggtctgtttttgcctctcaactatctgtgaagaggcaggtttgatttttcaatttacaatctgtcacagatggatacttacgtaaaattcaataaaagtaaattactagagaaatgaattgaaataaaacatgcaacatacaaacctgaatattttgttattagattcaatacacataaaattactctgtcaaattattgtaaagatttttaaacactgactctcaaatctctgcatttctgtgactgtggagttgttccagtgtgtgaattgacactggtttgtggaacacacttcaaggagaaagagtgtagactcaaagaattaggttgctaggtcaacgggtaaatacatgggtggttttgccagatattgccaggatcaccccacagggattgtgccatcttgcacaccccaacccctacagtagtatatggtagtggccctctccccactgcttcaccggaagactgcagcaagtaacttggatttttgctaaacccatagatgagaagtggtatctcagtctatgttttaacttgtgttgctcttgttatgagtgaggataagtgtcattcatattttaagcccttgtttgtatgtatattctttgcctatttttctactggattgttagtcttttccttcttgattcctagaagttctataatcacccgatgaattcatcttgctcactgtccagaaaagccaatgtattgagaacagcgggtttttgcaatagagaaagaacttaatagatgcaaagccagctaagcagaaggacaggagtttatcattattcaaagcagcctcccccaaaatttaaaggataatttggggagcagtggggctagggagtggagagtactgattggttaggtcgtggatgaaatcacagggagttgaagcctgtcttcttgtgctgagttcagttcctgggtcggggggccacaaggtcagatgaaccagtttatcagtctgggtggcatcagcagatccaacagaatgcagggtctgaaaaatacctagaacaccaatctgaggttttacaataatgttatctataggagcaattaggaatcttgtgacatctggctgaatgactcctgagccatactgtcttataatgtggctaatttgttagtattataaaggagatctgatctccaagcaaggaggtggtttgctttgggaaggggctgtaatcttctctgcttcaaagttaaactgtaaactaaattccttccacagttagcttggcctaggcctaggaatgagcaagggcaacttgcaggctggaagcaagatggagtctgttaggtcagatttcctgcactgtcatactttttgcaaaggcagtttcagttctttatatattaggaatattagtctcttgtctgtgatatgaattgcaaatattttttctagtttgtcattttccttatgattttgattgatgttgtttttggggagaggagggggaagtgcaggtgtttgttttttaatgtagtcaaatttatctatcttttctttgatggcttctggattttgagccatggtttcccatgccaagatataaaggatcctgcctgaattttcttctagtatttttatgattgttatccttaacattgaaatcttttgtctatttgaattttttcctagtatataaagtatgagttatggatccagatttatcattttacaaatagctacccatggcctcagctccatttattaaaatccctaagatactacctttatcattaaaactaattttaaaccatttgggatcataaatagaaaaggcactataatttgtcagttttgtacagaatgctattacaagggaaattagctttcagggagtgatctatatcttcgcatttactagagcagagcaaactctgagtaacataaatacaatagaaatttatttttcaaatcctgtgggggcactgtaaccacaaggaaattgagggaagtgggcccagttggagggagcgcttggtgagactgagtgtttacgttgcaggtcttctcccctgtctgcctcccggagctaggactgcagaggggcctatcatggtgcttgcaggccccctggctgtctcgctgttgctgcccagcctcacactgctggtgtcccacctctccagctcccaggatgtctccagtgagcccagcagtgagcagcagctgtgcgcccttagcaagcaccccaccgtggcctttgaaggtaagagttgcttcctacttggccctgtcttgcaatggccgtgtcctgaaggacttaggtcagaccttggcaggatgtttctggctgttggatgtccttgggatgttcattaactgctgggtcccgtcccggggtcctgagactcttcctctggtgctggatgttttaagaaggatgggcagcaatgggctggaggggtctaatttttgtctctccgtaatttattcaggcccttcatgcatgccaacctggggtaaggggagtcttttgctagaaaaggaagttgtggatgccctggctgggggtggccaggggtctcagcatgactcatgcattaggaggtgcctggagatctctggaaagcttccttctgctctaaggggctgcagggatccctctctttagggtcttgggaaaccccggtgcaagggccctggtgactcataactccttctatttgtcaagggagggtatgagaaagtcctatgaaagtgtttcccaaactgggatctgtaaatcactggacatattccaaggggtctgtaaattcttgataagagtttctaaaattagtatatacattctaatacttgctaaaaaaaaacaaaacaaaacacaaataccagacattctctcacgatctgttacacagtttggggggggtcatggttgtgttacagtcacattagtacttcttgaaccaccacctacttggcagctcacactgggatctgcagatgtagtctcaggggttcctaggttcttaagtttgagggacactggcaggtttcctcctcatagtaaccctgttggggaggcagtgccaggagatcgtcactgccttttacagatgggaaggcctaggcatggtgggccagagaggcttgtcagagccagtcctcagttctgggctcctgattccacgtgcagtgctctgtccactgcccactgcagagcgatccgttgctctatgctctggtggcccatacaggaggacatgcggagccccatcctgcaggagtgggtggggtaagatggaacccagctggaaaaatcaaccaatgaggcctaggatttgagaggtgggagaggcagtatgaatgagagtctgggggtgttgtggaagggtgggattcccagctgtgggttggctcctctcagggaggaaggtttccagctgtcttctcggcgctgtcttgtttgagctgggatccaaggctttgaaggcttaagtggattaaagtaaattaacaatgtcctaagcctgcaaaactcgtgcacaccctcagacttctgatggctcctggagtgctggtggctgtcactgaagaggacagagggggacagaaggagtggattcttagggctagcctcctcacactggggcctctgtggcagctcctaatgaaacatttcctcccaggggctttgttgggggcaatattggcttggctgagtctgggggcagggacatggaaggagagctggggaatccctgtctcccgaccaatcaggtctccatctgtgcaaattgggttgggggaggaagtcagagaggtgggagatgtcttctgtgtgtgcctgggttccttgagaccatttttgaccctcaggtatgcattgaatgaatctgacttctcgccccatcctcctacagaatgaaggaatgcccctctccccttccccattctgacagctttgagttttcctatccgtttgctgaatttttattgggccctgctttgtgccaggcacagaaggggatgctgtggggcctcagaggtgaacaagagtttcctctgcgtacctaatgatctcgtattgttggttaaaagtcactgcctttggtccctcagcccagctggtactggttctggtcctggaccaggactggttctcttgtgttcccacatcccttagcacagctgagcacacagtagggactcaattcatgctgggcaaaggactgtgctctggggatgctgtgttcaggagaagttgccctaatcaaggacagcaccaaccccagcctccaagccccctaggatgttacacttcctttctgaccaatctgtaggctgccagccttgtaactgtgagtttccctctcccctgacacctgactgagctgtgaataacccctaaataccctagaggagctgccagtcacagaatctgactgctgtttttctgttttgtaaggctaaattttcccctgtgggtttctcttaaggggggccaagctgtgtttctcttcagcctgcatattctctcatttgccagtgttacctttccaggcagcaggagaagccagcctggacttaacaaatgacggtggttaatccacaaggtgggtaattgaattgactataattaaaatcacaggcgtgtcatggagaatgtctttttctcttaaagtcaccgtccaaagcctttgccgcacacagagctcggaacgtgcttggtgttttaaagacagccttccctctggtccccttggcctgtttaatacgagcaggctggttcccttcccaaggcccccctaggatccccgtgctatgcccggctccttctctccccacttcccccatcccccttgcccatgtgggtgagggctactgggagagggacggaaactggaagaggccaccaccctccatgcccccacccccacctccccatttttatcccatcttgtaccctgtttcctcttcttttcccctcctccccaagaaagggcctaagtgaagactgagctgggaagtccccagatggagtatctactgcagacccgtcatgccacctcctccctcatttagctgcctacatctggaatgcccttgttgaaagggaaggaggaaattaaggtgcttgctgctgttagggagcacccagtctcatagggacagggaagaccctgccctacacacacagaaaatatttgaccacattcagagtggtcaaatacaccataacatacaatgtgaatggaatggaaaaatagagagaatgtggagcaaaataagatcagggtggagaggttgtaatccaggaacgcttcctggaggaggaggatccttggtttcatttctaaggtaatgtaatatttatccaggatttctgagaggtcagctaaaaacctaacccaccagactccagatccacttcttatcctatattgcccaaaagccatcgtgactacatgacaattcttgccaacctatagtcaccaacctataatcacctgctgggggcaaaggcaggcccaaggggtttgcttcattttgctgcagaatttctttcttcttctttttttaatcatgcctatcacagttttctgaaaaacatccaactcacaaaacctccagttctccagggagcgattaaatgtttgcctgtcgtgcagaaatgaagggctgcttttactctgtagtggagggataatgagcaatgatttatttcctttggattacacacacacagactctctctctctctctgcctctctctctatctctctctctctcctggcccttctgtgagtcagttgctaaggcactgtggggagaaagcacagtgcctcccattaccctgaatctttaccaacagcggcatgaaagttcctctgctccatggctctctccttactgctgccaattcccacccatccatgggtcatgcataggctgagggagagctatcaggaggctgtgaatcaagaagggagaagtgtgtctccagcaggagggaaaccgggcgagtcagctggcactttctaagcaggccctcccagaccactccccatccgcccagaggccgtgaggtctcctctctgcccacccagtccctttgaaaggccttgattgggaacaaccttccttggaggcagggtggacactgaccgcccaatctctgcacctcccacctctgcagaatcttgtctgaaaatccaattcccctcatacaagaaggaattgaggattattcatatattcgttcaaacactgctaggtgctggactgagcctggagatctaggaagcaaagtctttcttggcccccagggcaaactaccaggctagacacacagtgtggcagtaaagtagaagactatgggagccctttagcctggcttgaagcagtcagagaaggcttcttggaggaggtagggatgggggtgaacaggaattgttccatcaagggagaacagaagcacaaaggtttgcaggctcttgtgggatggatttggggaagtgtgaagtgttttagtgtggctggggtggagagtttagggaatgtaaaaggtgaagcatcattctttcaggggatcagtaaataatcactgtgccaggcactggacttgggaggacagtggaccagaacccaagggccttcgcaggagttggacttttcctgggggtagttgggagctatggatgggttctgggctggagagtgacatgaccacatttgcatttgagaacaagcgttcaggttgctttgtgggaaaaggactcgaggggcaggcctggaagccaggctggttaggaggctgttggcactgctccagacaagagctggtggtggcttggatgtaggtgggatacagtgggaaaaaagtggatggatttcagaggcagtgtagaggtagaacaggcaggatttaccagtgtgtacttatgtggctagtgaaggtctgggggaagtcaagggcgagtataagtatcccttcatgcctctgtggggagggtagtgccctcctctgagctaaggagtgtggcagaagaatgactacaacacccactcccaagtccctaggggcacacagaggtgggcaggtggcaccaggtctcccgggtgccaccgccccacttccccctgactttcacccttctgttctgtggtctgctgcgatgcagctgggagcctctggcccaacagtaaccacagggttgcctctccctccaccagacctgcagccgtgggtctctaacttcacctaccctggagcccgggatttctcccagctggctttggacccctccgggaaccagctcatcgtgggagccaggtaacaaggggcagaagggtcggggtgggaagtgcaggggcttggagctgggtagagggaatattattcaggatgaactcacctgggcagccccgcgtgctgggccccatcctctctgctgggccctctccttgtggatgtctgtccccccacaggaggaagcgtgtttcggctgggtgggggtgggggtgactcttgacctcgcaatctcagccagctgcaggcccctgtggttggcagttagtgagagcagggacgcctgctggccacctcctgcccggtccctgcctggtccctgcccggctgtcagaatggttttctgggccaattccccgggagttccatgcagagaaggtgcccaggggccccctgccggccagccggcggcctgcacctgggacggctgggtaggggtagaacctttcccgaaggacctcacctacctttggcctgacctcttagtccactgttcagatccaatatcaacagacagtactctctgggggaacctgtggagactttctgggtggactaggaggagctcattcctcatgaaaccacagaacattggctctggtagggagggggcttagagagggccgaccccagtagctctcatggtgcagtctctggcccagcagcacccgagaatgtgttggaaatgcagattcttgggtccttctcagacctcttgagtcagaaactctgggaagaggcaacctgtgttttagcaacccttccaggtggcctgaccacactcaagtttgagaatctctggtgtcatccaaccgtccttattttaaacaggcggtagcagaggcactgagaggggaaggtgaccttcccagcatcacatagcatgatgacaacagggtgtggggactacagccaggtctccttaacccaggcctagagtttctctgcaggtctgtctgtgttatcgcctgggactgcactacttttcagctctgcagcccagaggttctgactcagtgggtgtggggttggggagaggatggccactgggttgggcacttccgggccatgctgtagctgaccatccttgccctggagctttctttagtgtctccaccccttcatttgctgtatgaaaatgaggcaagtcaagaacacagctctggattaggtgtggatgagctgggttcctgtcctgggggatcttgaccttggagcctcagtttcctcatctgtaaagtctgggttacagtctctgtgccaccagtctcacagggctgctgtgaagctgggcctgaaagcatttttcttttaattttttaatttttaaattaactattttgtcttatggtaggacattcaaaaggtacaaaggagtatatggtgaaaagcagggccaccccctcaaacaagcaggacccctgactgaaggttcacctagtggtgaggttcctgactgtgcccccagagggagtctgtccatatgcaactatacaggaggatggactttattttcccagcaaagagagtaattgttttactctctattttgagatgactgtcgatttacacacagttgtaagaaataatagagatcccatatacccttcacccagtttcccccaaggctaacatcttgcataactgtaggacaacattaaaatcaggaaactggccttgatgtgatccttcaacctaattctgatttcactagttttacatgtgtacttcaacaaacccaaatggtagcatccgaagactctactctgaaccttgtgaaagcatttcaaaagctgccatttattccgcaccggccatgtgccaggcactattttatatgtcatatatgtagtaagtcagttactgcatgtagtaaaggtagtaaatcacacatgtatttaatctaatacatgtagtaaatcatgcctgcagtaaatcattgaatcttcacaagtgggtgaacccaggaagtgggttctatgtacccccattttatggaccaggaaactgaagctcagagaggttatgttaccctgtgactgtggtcacactgttcttcctcatccgctctgcggcttccccagaaggtggttatgttttctgtctggaggcttcccacacaaagatggagggacactttttcctgcatccttgagcctggctatgccctcagatggacagggaaactcaattctagacctggtcccttaggcttcttagagccaatgtagtgggtctttggccactttcttttcctgtctccagctcattttccttcctccttttcttctgcctgacattgtcttcccttcttcttgacccctggatctctggaattcaggctagggaaattttttattcatttataaccctcccttgttccgaaagggatttagggtgggtcaggctacagagatttctctctgttctcatattccagctcccaggagagttgactgcgatgttgtgatgaatgatttttgatgggataaaaatgaataaagtgatgcaatgtttcccctaatttgttaaagctgtgagcagatgcctgtgttacctaagcaggcagctggggcacagccataagctggagcttatctgttcccaggccaggagggtgggatagggagagctctgctaaggacttggggagggggttggagaaggacagcagaggcctggagccaaggtcacctgggaggcccgcccagccccaggacagcaaagaagatgagtggggcctgggcctggagccagagctgggaagagaagcctcctggcctgcggcatctccttccggctctggattccttcagcaggggccctctttctcttccggtcccactccacagcctttcccctcatttccctcctcagctgaggtaggccagaactttctaaaatctttgttcctaaaaagtttaggaaccaaaataggaatagcccaaagaagacagaagaaccaaagaaagaaaattggtgggggaaatcaagactttgcatctgttcagcatgaacagagcctttaaatgtgcatcacaccattcctctgtctccacagtcctgtgaaataagaaagatagccattcacttccccattgtacagatgcaggcactgagactctcagaaggtggcaggtggctgagctggaattctccctgtctgtgcatggtggccttctgactccagcatccatgcaaacaaatttcagcagcagctgacacttatgatactcaataagtgtctgatatcattattactactagtagtatcctctttgttactgaaggtgaaaactgtttgaggttgataagtctggaagccctgtgcaggctggactgtggggagagggatggtgaggtggtggatggggtcgtttgggttagaggagagagggtggtccagaaaggtggccacagaaaggtcagacctggagtcactgactgctggagagactgcaggagatgaacaaacaaatcggactcaggaccccgggatgtggagccaggagagatggctggcctgtgtgagaaggggtgagtcagggtggagggccagagtaggaggaagctggctgtctgcatctctgtaagagtgctgtgaggctttacatttaacagcctccatggttggaaaaggtggggtcaaggggttcctcccagggctagctgagttggctgggagcagagacagcatggaacttggaggaaagtctgggtttcaatcctaactccttcacttactatcttggtgacttgggccatttacccaccttgcttcttcatctgtaacttggagcttcctggatttcctcccagggttgtgtgaagattaagtgagcaaatggaggtaaagctctccttaggggttgaccctaggcaatcagcacccagtcctggcgtcccaggaggcccaagccaggaggctgctccctgggtcctgcctgcagaaccagcgtcacttaggatgtctgtttccattttcacaggaactacctcttcagactcagccttgccaatgtctctcttcttcaggtacgattgctttcttcccttcccttcctataatttcccctattccagagcccaaggcagggcaacgcaagtggcgccattcagaattcagcccctaaagttgaaaacaggagccacttgttcttttcactggccatggactcagaccccagctatcagagtcactgcccgcaatgtacgtggagggagggtgtggctcacatatacgcagaggcacacaaggctcttgcatcatgcagcgaggctgctaatgaggaagggagaaaaagaatgccaggctggggtgaccaactgtccctgtttgggactgagaatgcagaacttccagtgcaaaaactgggacaatactgggcaaactgggttggttggttattgtaagtccccagacctggctccacaggagggtctctgagttcaggcctccacggaaagggtgttcctagttcctttcctagcccagtctgaatgatcccattctaactcagcattttctttgagctgtgattgatttattatctgctgccaagaaggacttcccaagcataattccctaagtgctctgagaggcgttttaatgggactccttggtccagaacatttatcccagattgagaaacagatgtcaaaccatctttgcagaggctgaatattgtagagaaaggaaggccatctcttcttcaatgaggggagagcctcaattctcatgtctaggagacatgttctagtctcccaatgattaagcattcattgagcacttactgtgtaccagaactcatggctagggggccacgagactataagaaatgcagagtctctggccttcaggaaaacatgatgagtgactaacctaatcagaagttagaacttaatcatttgctgggctgtttggtatagagtttcactgccacaagggagaccttcttggggagctggtatgacattctggccacacctgggtccacacacccagggacattgcagttcttggctggttgctagaggggaggtataaggaagcagaaaatctgtgcccattggaagggaagggttgggaggaactagggcaagttgaaagaaaatgccattcatccatttgtctgtccatctgtccttctatccatacctttactagccagcctgcccatccatccatccatccatccatccacccatccaataaacatttgttgaataaccactaaaggccaggtctcatcctaggcatggtacaaggcatttgagttctaaagtgaatcaggcccagtaccttgccgcaaggaatatgcacataagggatcacatacgattcccttgaggggctgtgcagcatattcctgggatctgggctggagcaaggcaggggaagttccccagaagcagcatcttgtggcctgtgagctcagtcacaggcagccagtccagagcctagtttccattggccggaaagtaagccaagttgccaaacccagcaggtcagggcctgggggaagccagtgcagaggaggttcaaagtgggcgggaggaagtggacccaggggtcccaccctgagctccaggcagctgggtttttatttggttcctgtggtgtgcagatgaaggccttctaggagtgtaatgtggctgaagggaggaagagaaatagatacacagaaataaaagcaatgctgttaagactgcgcttgatgactgagttctggggtttggttcatccaggtcagtgttgacctggtgtcagcctggggcaggtagcttatggcagcccatagctcaggcttggagcagggtctcagctccaacggcattccctgaagggccctacagacaagcccccaaagcaccaggaactggttgaccacctttcccagcatgtctcttaggggcctgacctcaggatttcagactggattcactgtgacagaactaagggaataaatacattttatgtccacgttcccactctggtgtgtaccatctgtccacagaggggagagaacaagcaagaggttggggtgtgccatccagtgtcccctggagcagaccttggcctctggtcttcagtgcccggtcctcctgtctgttgtctggcctggtgaggaagccctgacttgtaactctcaaagcctaacttcaggggttgccctgccagtgccctctccgggagctttgggtccctggttataagctttcagttctcagtgtctgctgtcaccagtaaccaagtgctgaaaatgatctgtaccactttgctgacaagggcggctgggccagggtgcccccgcccagcttcctctactctccctgtggcctggggctacacttgggttaaaactccccattatggagccaactgattctcccacttggccccagggcatgatttaagcaaacttaaaactcaatgctttattgatagtttaaataattaacattacgtaaagaaaaatctaaatgtaaacagtttttgcaaacgagtatccattaagggacttccaagtacctaacccctattaaacaatttatgtaaaccactcttccttaaagaaaatcgaatgcccagctccttcccaatcctccaagctctgaagtagggaagaggtgcagctaggagcagatggggcagtgtgtgtgttggaggtggaggagtgggggaaatcaaatcagctcacctgtgtggttatttatcagtgtaacttaataaactggtactgggaaagaaaaggaggctagtgattgacagcatccccgggctgctgagaggaccagcatgatgagctgtcttggagttggcaattaggagctcgtgagcgacctttgccagaacagttccatgggacgacctggctggaggcctaattgcaacagatttatgatcttggtttgccagatatcctgcgaggcagaaacgaggactgttctgcacatatgcatcaggacgcataatggggctttgttcgggcctgggcagacatggagggcaatgcctgagctctcttccagtttatctccacgtcctccaagctcaaatctggcagccctggagtggtttgaagttgaaactccacagagcagtggacttaatgctccaaagatgcgttgacattcagccattgtccctggcccccaagtgtccgtgggagttgctgagttttcatggagatgatccacgtccctgggtgtcgcctgcttcctctcacagcgtgaaaaccacacagctactgttactagagatcatcctggaatttctgggacagcccttgtttaaagcactctgtgttccagattgatcagacacgtctctctccaccccttcacaaaactccactaaaaagagtgagaaattttaaagggtgcacattcacaacaacagagagaatgaaaaagatgtcagtgaagaagagattatgcattctggggcaatggaaagcggatagaggctgggcacagtggctcactcctgtattcccagcactttgggagcccaaggcaggcggatcacctgaggtcagaagttcaagaccagcctggccaacgtggtgaaaccccatctctacaaaaatacaaaaattagctgggcatggtggtgggtacctgtaatcccagctactcaggaggctgaggctactcgggaatcacatgaacccaagaggcggaggttgcagtgagcaggtatcacgccactgcaccccagcctgggcaacaaagcgagaatctgtcaaaaaaaaaaaaaaaaaaaaaaaagaaagaaagaaaaagaaaaaaaagtggatagagcaggtcggcttgcagaagggatgcagtggacaggcagctgactcctcagaagggccccagaattgggtgtcccatattgtatgatgtgaggatgaggtacaaggatgaaaggaaggattgattgacattctctaaattaaagggttgggacccaggtctcctgtcccatcctgaacagcaatcctttcttccatcttctccctccctccaataaaggaatcaagaccctttctccaaagattcaactagaaagtctccatattcagagactcctaaagggcactgatggggtgtgatcagacgaaagtctacttcctcctcccaccccctgctcccccagccccacttccaggcaggagactaagggagtctttgctggaaaaactcaatgactacagagaccagacttttagaatatgacatagagggcctcccagtgaaaaaggctcctcacccagcaccctacaagaagcccaccagtctctatgagacctcccatggagttcccagtgagctgcttagtactttactcttaaagcaaacaaacaaagatgcttttttttatcacgtaatttcatacacacacaaaagcaaagagaattgtacatgaaccccgtgtactcaatagcactttaacaattatcagctcaaggtcaatcatctttcatttacatacatccccccacgtccctgtcctgaagcaaatctcagacatatcataacatccataaatatttcagtatacatttctaaaaaatagggattctttttttttttttttgaggtgggtctgactctgtcactaaggctagtggcacaatcattactcactgcagcctccaactcttggcctcaagctgtcctgctgcctcagcctcccaaagtgctcggattacaggtataagccaccataccaggctgggattctttttatttaagtggcccaaagttaataacttcatatcactaaatgtccagttaatgtttacatttccctacttgtcttataaaattttaaaataattttggttatttgaatcaggattcaaatatgctgcaatttgttgatatgtctctttaaaacaatatttctctctgtgcaattttttattgtgcaattttttattgaagaaacctcgtcacttgtcctatagagtttcccacagcctggattttgctgattgtaatgcaggtggcatgactgaacatgttgctctcttccctgtatcacctgtacattgattgttagagctaaaaacttcattcaatttagattctggcaagattacttcataggtgttcttgtgtcctttctttaggaggtacacagtgtctgattttctctcttttgatgttagtaatcagtgatgatctttttctagatcctttaattctttaggtattacaatcaattagctgggctacttctataaaaacaaaatttttgggccgggcacggtggctcacgcctgtaatcccagcactttgggaggccgaggcgggtggatcacctgagaccaggagttcgagaccagcctggccagcatggtgaaactctgtctctactaaaagtacaaaattagccgggtgtggtggcgcgcacctgtaatcccagctactcgggaggccgaggcaggagaatcacttgaacctgggtggcaaaggttgcagtgagcagagatcatgccactgcactccagcctgggcaacagagcaaaagtctgtctcaaagaaaaaaaaattcaattaatgataaacaaccaattagtatcttctgagagatacaaaatattttgtttataaaacaataaacttaaaatatggaaatttaaaatgtgattgggaaaataaacattgaattgaaggattagaaaataatgttgaagaaaaacctaccagaacaacaaaaaagaaatgaaacataggagagaaatatcagaaaactagaggatcaatgcacaaaggccaacagtggattggaatattaagagttccaaaaagagaacagaggaaaagatgaggaagaaattaaggatgaactaacgtaagaaaatttgccaaaacagagaatgagtcttcaatgctaaaaggttgactgagttcccaaaaaagacccgtcctaaggcacatcagtgtgaaattcaggacactgttattaaggagaagatcctaaaagtttccagagcctaaagaaaaaaagaaaaagaaaatgtcatcagagtcctcaatagcaatgctggaacctagaagacaatggaggaataaatgcctttaaaattccaagtgaaaattattttcaacctagaatttggtatcaaaactaccaatcaagtatgaagagagaataaatcagacatgcaagaatttgaaaaattgatctaccatgttccttttcctaggaagatactggagatgtgttccaccaaaataagcgaataaatcaagaaagagggaaacatgcgattcggaaagcaggagaggaaagaaggtaagccccaggctaacagtcaagcaggaggcctcgagagcagccagaacactaggcaggaagatggaggttgggggatgaggaagaggatgggaactcacagattatctgaatcatttgtgcatgcagtaagaaaatcatattgagcccaggcatggtggcttacacctagaatcccagcactttgggaggccgaggggagcagatgacttgagaccaagagtataagacaagtctgggcaacacagcaagaccctgtgtgtacagataattttaaaaactagccaagtgtggtggtgtgcacttgtgttcccagctacttggaaggctgaggcaagaggatcacctgagctcagtgttaggttttgaagggaaggtgaaggttaaagaaagacacacacacagcaagagggtggctcaacagcaaatgcaggctctatgtccagcataaacctatacaagtgggaaactagcctaatgccagagcccaccactgcttacaggctaggggtacttataggtatgggtgggaggggtctgggcagtatggcttgctgcccagcgggatattgataagatgttcccatgatgaggcagttctggcccttattcccgtgggatgtcatcatagtgttccttggacctttgcccagcgagatatgatagggatatttctttagttgggcctttgtctaccttgtggtcaggtgattaagaaggatgtttctcacagcccgaatgcctgggaaatgtttcactttgaccaagggttgcaaaatagtggggaagcttaaaatggtgcagtttggactaacacccaggaggttgaggccgcagtgagccatgattgtgtcactgtactccagcctgggggacagagcaagaccttctctccaaaaaaaaaaaaaaaaaaaaaaaaaaatcatattgagagggatgtgtaagacctgttggacatttggggaaaattggtgatagttccatgcaaaacaagcaaatggagacaatcaagacaattattcagtccaagaaaaccaaaacattgttcaaaaaagggaaaccttatcagaatacgaatatttcattgattctcactcacatgcacatgttttcacattttaatgagtctgaagttgggacgtgtctttcagttaaagacatctgacagtcacattcagccaggtgcagtcttgatgttgtcatgcctgtgcaggtatgaacttagtcattttttctggtgttctgaccagacaacagcaacccctcgacgtttcagtccacaaaccattttaggatcacatgagggaagaatgtgagtcctggtgtgtcagaaaacctgtaggcatcttttggtatcgtgctcattctataagcatccagacttgcaggatgatgtcaatggcatggaagaaaattgtggagatcagagtcctttaagaattattgcaacactgacacctaggtagttcaaagaatgattctctaaacagacaaacagcaaaaatgagcactgacaactctaaaaagtgattcagaagagatgaacactgaattcaaaggtttaaggatactcaattttgcgtatttttttgtatgccaagattgatatatgataaaacatatgtctgaataagagcactttcaatatgtatacgttaaaattttaactaataagagcatttgattggcagcaattttgtttctcagtggttcatattacaagttgatggtgccatatattcagtgaaatctggggtactggctgtaaataccaatgttgattttaattaaaactgtcattataatgggaggatggggagatgggaaatgttacgtgtgctttggtgcggggaagaacggtggtgggtaagtgggaaaaatcttcacctctgtaacaggaattcaaaagatgaagactgagattgatacatattttttagaaatcgattttaaaaaacagagaaacaactaaaagaggtgaaggtggttgtccttgggaaaaggggtgggctatgggaggagtgggtcgtcggagttttaattaatacattttaatactatttaactttttaaactctgtgcatcactaatttgataaaaataatttttgaaataaattaaaaataaataaatggtctcaaaaaagccattctgtgctgttctctctataaacctatatacttttttgggggcatatggcctaacttttggttagagaaatctattcactgtgagaggctgcaggatgtagcagaaagagcttagttctggtgtcaattgtctggagtcatcttgggtttctcgtttactagctgtgtgaccttgggcaacttgctccacctctctggactttagtgttcttccctgtaaaacaagcaaaaggctatgtgtttcactgttttctgtgaggatcaaagagaaaaagtgtgtcaagtccctggcacagtgcctgtcccactgttgaattcagcgtaactttaactcctcttatggtacagccccctcttcaatggaatcaaggctgacccctttggtgtgctcctctgctcagagactcgaggaccctttgctcatgcggtcctcgcagagccgcccaccgtccggggcttttggcctgcacaactgcaatgtttgtggctcgttgctcttttctgtccccagaagccctgagatttcttatttatggccctctcttctctcatatcaggctcagcctgggagttgatgggtcctgagtatgacagtgctcggttgtttctgtccagatgaacaccgtggctctgtggccagattcagggtcctttgctcttctccaaggtctgggagacacagaagcctgggctccaaacttgtcactcatctcctgaatccagggtgtgcaggagtcagcctccctctgcctcacaaagcagccatcaccagggcaggttggctgtgggctggaaagcagagagaggtctgctgctcgctctcccggccccctgcctcccctcccacactgcggcctctggggctctgcaggcagtgacttcatggctagaaacagccttgttagaaattaaaagcaggtgggctcttttttttcccctccccatttggaagacagagctgctttctcagggctccctctcccaggacagataggcagttcatgtttatacacgtgacccagaaatatataatgagccacgccagggctgttgacattgcctggacgtggagggcatcacgcctcccttcagctgctgttcagagagagtagaggcagaatagatgaaggggaagaagagatcctgggttggggacagccctctcctaatgccatgggcatgtgagaacatggcactgtcctgcaggtccccacatgaaagctgtgtccccagacacattaccccacggcagagcatgagtgatgctaccagggaagctgggaggaaagtgcagacagtgggggtgggagggaggagagcaattaggaaaggggaagtcctagcccttaagactgtgggaacacacataacctttggaatcagaaatgtgggttccagtccctgctctacacgaggttctgtgtgacttgcttaggtcacacagaaccttggttttccccatctgttaaggaaaaagcccagagttgtcaacagaaaattaaatctcttacattcagggtttgccaaatcttttctcccttcctgcctgccgctgagttgagggccatctggcacagaataggcgcattccccacccagggcctggggtgggattgaaggtccttcggccacttccagctccctggctgactccgagggcagatctgcgtggggatgatgaaagattcagaagctgttcctccaggcctcctctgacacaagcaggcagtggggtgttgggctgagggtgcccacctgtgaaagacctctgggtaaggagattgggagccctcccacgtccatgtggatgtagtgagaggagccctcaccctgcagaccagccctccttcacagcttcatgtccactcccgacactggctgctgcctgctctgccagtgagtggcagtaaatgacacagccatgtgatgtctgtgtgctcctatgttcctcccccaggccacagagtgggcctccagtgaggacacgcgccgctcctgccaaagcaaagggaagactgaggtacgtggtctcggcggtccaggggccccacctggagctggaaggaggcctgtggttgtggggatggagcagcactgtgtggactgaggtcccctgctagagaggcctggccaggatgagctggggctccttgggcaggtgaggataacagccctgtggcgagctggtcctgagcatctgagtgagcagtgatgcggagaaatgaccttggtgggaggggacgtccacagacgtgacccggacgtcgggacaggtggatctggggtcaaggggagtgtttagaatacttgttggcatccatgacgcagtggtgtgagcgtgagatatccagcatcgcacctggagagctgtgctgtctgctcctttccttcctgcctcaggaggagtgtcagaactacgtgcgagtcctgatcgtcgccggccggaaggtgttcatgtgtggaaccaatgccttttcccccatgtgcaccagcagacaggtgggcacctcagggtggaggagactgaagggggcaccatgccgggggttctcctgcctaggcacacagccttgaaggggggttaccaaattttgcaaacagacacccaaaacagaaacaaaaggacacccagttagatttggagttcagataaacaataagtgatattttagcataaatgtgtcccatgaagtgtctgggacaaacttatactaaaaatttactccctgttcgtctgaaattcaaattgagctgggccttctgtattttgttggtcagccttaccttggagggtcctgactggggctggaggcagatggagctactgggaggacctctccctcactgagggctgctccctcagagggaccatgagctgagcagtgagatgacgctggaggaggggagaggcccagagagactggggcacaggaggaaacaaaactcagatggaaagaacaggcagccccagggcctcagggaaaagtgtccccttctccccattgtccccaggtggggaacctcagccggactattgagaagatcaatggtgtggcccgctgcccctatgacccacgccacaactccacagctgtcatctcctcccagggggagctctatgcagccacggtcatcgacttctcaggtcgggaccctgccatctaccgcagcctgggcagtgggccaccgcttcgcactgcccaatataactccaagtggcttaatggtaaggaggccccagtgccaggggtggggactcccctggttttgagcccaccagcccaccctgagccccccattcatcctccttcctgccaacctctgcaagtgctcccacttgcctcatcaaggaagaggtccagagtagggcagagtagaccagagcatgctagagatgggccccagacgaaatcacaggtgatgtcccgaggccacagaacagatggagggtgggctattaggagagacggagataattaggaattgtttaggaaaacaagttatggataagaaaaaattacggggccaggtatagtggctcatgcctgtaatcccaacactttgggaggctgaggcaggaacatctcttgaggccaggagttggagaccagcgtgggcaacatagcaagaccctgtctctaaaaataaaaataaaaaataaatcagccaggcgtggtgatgcatgcctgtattcctacctactcaggagactgaggtgataggatgccctgagcctaggagtttgagactgcagtgagctatgatcgcatccctgaactccagcctgggtgaaagagcaagagccagcctcttaaaaaagaaagagagggagggtatggaaagggccatatgagtttcctagcccttggggttgaacccctgcttcctcactaactattaggttggcgcaaaagtaattgcagtttttgccattaaaagtgatggtgaaaattgcgattacttttgaaccaacctaaatagctgtgtgtccttgagcaagtacttaacctctctgtgccacaatgttgtatctgtaatatggggataatcataggatttacctcatatgttgaaggactggattaatccacataaagtacttaggatggtgtctggcacccagtgagaggtgggcggtaacacatgtttaatattacagctgcccttggtattggaagtgggaagagagttagttagggcccccaggtcaccaagattgcagagagaaggatgtcaggatgcccatctgggaaaaccgaagtagttgagtcctcccgactctgccatcttcttccccgctggcctgccctgccccttgttcctcttctgcccacccagagccaaacttcgtggcagcctatgatattgggctgtttgcatacttcttcctgcgggagaacgcagtggagcacgactgtggacgcaccgtgtactctcgcgtggcccgcgtgtgcaagaatgacgtggggggccgattcctgctggaggacacatggaccacattcatgaaggcccggctcaactgctcccgcccgggcgaggtccccttctactataacgagctgcagagtgccttccacttgccggagcaggacctcatctatggagttttcacaaccaacgtgtgagtcctgccctctgccagccccttgcctgtgatgtcaggagctggcctggcctcatggcctggtgggcttcatctataaaatggggactgccgtgcctcctgccgggggtcatctgaggattttgtgacttactgcttctggagcggtaagctcgtgttctgggttgctgggaagggcaagcctaggccagagatgaataaagcaaataaatctgccttaggctgcatgaaggaggaacatgctggtgatgaaggtggaaaagcctgccttggatgaggggatatagccatgtaggggaggggagcaggcagcaatagccacagggaggctcaacaggaattcactaaggtcccttccaacctcaggactatgtgattctgctcaatctaaccagcagtcttctggtaaccctgccatcacctcccatctagactgtgctggaaaaccaggctgggaatggcagccccttttgcttcctaggtgtgaggacgagtaaccctcacagatcatgggaccctcctcccaccccctccctctgtgtaagaggctaacccaaacaggtgactttcctatagaccaagcttgtccagcccaaagcctttgggctgcatgtggccctggacagctttgaatgaggcccaacacaaatgtgtaaactttctgaaaactttacgatactttttttctttttctttttttttcttttttctttttgtttgagacggagtcttgctctgtcgcccaggctggagcgcagtggggcaatctcggctcactgcaacctctgcctcctgggttcaagcgattctcctgactctcagcctccagagtagctgggactacaggcacgtggcaccatgcctggctaattttttgtatttttagtagagatggggtttcactgtgttagccaggatggtctcaatctcctgacctcgtgatctgcctgccttggcctcccaaagtgctgggattacaggtgtgagccaccacgcccagctggcaatatttttttttttctcatcagctatcgttagtgtttagtgtattttatgtgtggcccaagactactcttcttccaatgtggtccagggaagccaaaagattggacaccctgatatagacagtgatgggtgggcaccgagaccaaggaaggcactggctgcacagtgtgctttgtaggaacaccagaagcctataaggcatggagtggtgtttgctcactttgggccccagatagcaggcactggatgagggccaggctagctataggaaagacagtgtgagggggtggaccgaaacgagagtcaggagtaggtggagaggcatcgaaactgacgccatcagtgtggattctaaatagtgtattgattgcatgccttctccatgcaggtgcctgtcctggtaggggtgcggcgtcacaaaagcagacatggttcagcctttaaaagcttaaacagggtgatggatattaaacaacaaattttaatcatgagaaatgctacaaagggaaagggcagtgtgcagaaaagcctctaacagtatagaggagtggtgatcagggaaagcttcctgtaggaagtgacatctataagatgaataggaataaactaagggagaggagcattccagcctgagggaatatgtgcagaggtttgaggtgggaagaaatgtttcaggagctgagcagagatcagtgtggcaagacatttaagggtgaggagaagaaagacaggaaggagggtgaaggggtagggcagggagggtatgtcccaaaggacattgcagactgctttaatctttattgtaagagcaaggagaaattattgacaggtttgaagcagtccagcgaccagctcggaggtgcattttgaaacgctcaccactctggctgccatgtggagaatggattaggatactagacaggctgcaggcagaccaccaggaggacaatgcagcattcaggggactagaggggggctgaaaccaggcagaggtggagagaaatggacacatttgggagaagaactaaatgcgaagaatataactggaggcgtttggtatggtggtttcctctctgtgagctgttcatgtaagattcatggaaacatgcttctgtgactgaaagggtctcctgggtcatctgaactcagggtgtggcaggctatggcataactcagtggtttggtaatcagcttttgtaaataaataaatcagaatagaatggaataaaatatcagagtgttaacatatttagtaagggtaagttcataaaacttctttatggatgtgtgcatattatactgagttgtagggtaaaatatatctcttaccacggtccatggactacaatgtttgaaagccactgtatttcagcgcccccgaataagggagggagggagggaggcagtagcacagaaggattcaccagtgcctcttgtcagtgggtcgttcccagggggtttacagaatgtgaggaccacatctcctccctttgagatccccccatgtgccagacacatcatagatgcttacagagccttgggaattggacatgacagctggctgtggggtttatgaggagggtgccaggtcttacagggagggccctgtgccaccacttcttgcctttcagaaacagcatcgcggcttctgctgtctgcgccttcaacctcagtgctatctcccaggctttcaatggcccatttcgctaccaggagaaccccagggctgcctggctccccatagccaaccccatccccaatttccaggtacagaatctcctcctctttccctgtcttcacacactgccttacccccagattaccagccacaagctgattcccaactgcttagcacagacagacaccagacccgtccctgccagtccatgcccatctctggggtccacaatggttccctgagggtattagcctctacaactgtgagggagagtgggtgaggggcagtgcgaggaagcatgctccgagccatctctaaatgtgagcccacacctccagggaggcagggaagtgggacctcagctctccacagtgtagaggaccaggaaagcactacacaagctgtctggctggaatttgggaatgttaagcagagctttctcgcagtgtgttcaacatgggtactaattcctggaagtggtcagtgctaggagtggtcagggtgtggtcagggcccagccgtgggtagtgtgagtatcccccatccccatggagaaagggaaagaaccagggggcagaggaggctgctgatggttgactttcgtgttcgcccagcttcccacccagggggtgggatggagctgggaaagacctcaagctttgcagtcctaccatctagcctatctctgtgtgaccttggacaaaaaagtcatccaacctccttcagtctccttttccttatctggaactagggataatactgtaagagataatacctcacagatatgtgagaaggttcatatgcctggaatgtaggagatgctcagaaggcttccagctttggtttagaaatcataagaactttgagctggcaaggacacaggagagggacagcaggcttggcccaaggtaggagaggggagcctgcagcaacagcataaaaatcaccggacactcgtccacactcaaagtatccgtttttagatagtccagtcccctttgctctcctccctcctcttccccaaccctggcaggatcctccttccccatctccccagtctcctgttcttagttcccaaagaagaggcatcccaccctggaaagggtgcaggacgcccagcagggatgctaggggtggggggtgctggagaatcagcgtccgctgctgtggccacctgggttgccaggaggagggagccggcgggggatggcggcagccctggtggccggggcgcgcgtgacctggctccccgcggcagtgtggcaccctgcctgagaccggtcccaacgagaacctgacggagcgcagcctgcaggacgcgcagcgcctcttcctgatgagcgaggccgtgcagccggtgacacccgagccctgtgtcacccaggacagcgtgcgcttctcacacctcgtggtggacctggtgcaggctaaagacacgctctaccatgtactctacattggcaccggtgagccggcccggtccaacctggactgcaggtcgggggtgggttgagggacggcgcggggctgcaagcttccggggccttcaaggccaccttggtctggctccccctctcctccagagtcgggcaccatcctgaaggcgctgtccacggcgagccgcagcctccacggctgctacctggaggagctgcacgtgctgccccccgggcgccgcgagcccctgcgcagcctgcgcatcctgcacagcgcccgcgcgctcttcgtggggctgagagacggcgtcctgcgggtcccactggagaggtgcgccgcctaccgcagccaggggtaagccgggacggggcggctcccgaggcctccactgcggaggaggcgcttaagaggcggggctttggacccgggagacctggggtcggtccctgcagtctccactagtgtgccttaggacaagtcactccacctcgctgaaccttggttctctcctcgtaaaacatcttgcagggtttttgtgagggttaattgagataatctccataaagcacttatcagtacctggaggaagtgtgtgcttagcaaattttggtgggtggctgttgttatccctgttgtcaaacacatagctagggccagtcaaccatctctagcccacttgatttattctcagtcctttctgtacagagagttctttatctttgaagccacagcacttattgcccagatgtggggacagatggagatgatgctttgagtcagccccacgtttttgctcctcttgcttccttccttagaagaggtagagagggctgctgcaggtagggcagaggtgaggcgccacgtggaggagttgccctggcttcccactgcttctgaacttggttcttcatgccgtagcttcaagcggactcacagatttgacaactgtggcatcagtgtttaagggggaaaccaaagcctattccaaagccaaatggaaatgtagcccagactcctaccacccgaggctctcccaggctgcatggcctcattttcatgatactcagaagctggcaccaccacagccatgcgagcttctgtggcctttgcaaccgagagtcctggctgtgccatctgtcctcaagattgggaagacaaatggtatccatgatacagggctgttcttcagctccagtggggtgtgctcggagctgggcagaggcctgtggggccaagaggagctggatggtcttggtgaggcagccaaggagggggagtctcagggcagacactccagctcccttcagccccaacacaagtctccatcagcgagacaccacacacttactaagacataccatgttcaggacactttgtaagactgttggtgtgagagaaggcaagagaaataggccccgaacactgatttccctcagatctccagatatctgggtgggaagagaaccttggcctatatcagacatgtggggagagatggtcgggtgtggggggaaggactcacatggtggaaccagacacacctggggctccatctcaactccatcatctactaaccgtatgatcttgaacaactaaatctttttgagcttcggctctctcatctggaaaacggggagacatttgatggagcaaatgatgtttaacaggcagagttgtaaggattgggactagtattcataaagtgcccagtctagcaaatcacaagaggtagctggtatctttattacttcttatctccccaaatgcatttaggagccctccagcctcctaggccctctggagtctcattgaatatagtcagtacagcttggcaatgaatcacaggctttcacatatggcttgttctccaagaggttgtaaatccttaaaggcaaacccagtgtctcagtattttttatactccaccagggagtcccacccagcccaaggcaccaagtggccttccacacatgactgatccttcagttgactgactctttggcgtgagaggagtttggcgcaggagaaacatggggaatgggactggaaactggattgaggccaactgagaaggccaaaggaggacttcgacttgaatcctgtggctgtgggcactggagtggtcctagagcagtggagtgcagtcacgggctgtgtgaaaagatcaatcagacagtggtgaacagcactgtcatgtatcaggtggatggtccaggtggcctagtatggctctaagccagatctgaaggaacggggcctgcagtggacgggaggaaggaaaggggctgggatgttcagctccagtggggtgtgctagggaggcctgcgctcacattctgcagagaggggctggggagcttgtgtagtgtgcccattgcactcttgccctggagcaaggcacaaagaggtcagtttggagtttggtgctttcatcctattttgtttcctgactttgggataggagcccttgatgtgtacagtgaaaaccctgctaaaaaactataggtgaatccaaaaagtatgaaacgcaaggtcacattatcagaagattagaaaaatggctagattaagtacacacagtcaccaagctgtgtaccccaggagtctgggagcaaactgccacaatatattagaatttgcactgctgtggggagtgttgtcacaaggttttactgtgtcctaggataggcatttcatgctttttccctcatgccttccaaaactggcaggaagatgagggtgggtaagcagaggcctcttcaggctccctcctctgcccaggatccaggggttatctccaactgcctcttttcactcaggagaatctcagccccacggggcacctccaagacctggcctggccagagagagatcagtgctcccacgaggaggagctggggaataaactgctgactggctctgcaaagcgggtgttttatgcatgaaccacccctttcctccttccagcatgcctttcaccctgcctttgagaggggtaacctacccccaactcattcacagatctcccctggctgccccatgagcacagggaaggcccactctcagccatttttttgctcacaagcttcagagataccttttccaccctggacagctcccactgtgagactactacaccacagtgctggaatcagcctgcctgcaacttccaccatccatctctgtcacacctccgagcccatggaatgaacctgttcctttttgtaatggctgcttgagacattgcagtaaaaaaaaaaaaaaaaaaaaaaaaagacatggtgatatattattggtctgatggctcctttatgaaaaggactctaaactgccacccatttccacagtcagagacacactttaagtctcttatccttggagctttcatttttcttaagagtgttccctgctctgtaagctttgaagtggcctttggccaaaagcagcaaacgtggttccacttgagccaaggaggcagttatcccttttattcacaagaagagagctcgggcactggcctcaagaagcctcaggggtcccctcaggctgccagggaaggggcagggcaggcgtgtccatgaagaatctggtatcctctttcttctctgggacttaattgagggcaggggaagctgaaggggtgagagggcttggagaaaggagactggagccagcatctactccacgtttttcttctttgctattctgccatggtttggaaagacaagacacttcatcccttggcttgggaatcttgacaaaagtggcccctggcacagcagttctcaaccatgggtacacagcagagttacctggggggtatttagaagattccagtgcctgggcctattccagtccaaaaagccaaagtataggttggtgggctttttgttttgtttgcttacgctttttaaaggatgcccaggagatcctaatttgcagtgaagcctgggaactcctgctgtaaaactggttaggctctagatggaagaaggagcaagaggccaattgcatttctccagaatcttctgcatttgtcttacataagctgattcaggttttctgctcttacccattttctctgctggcagacatttgtttttgattaatagaatattgtttattattattattagtcactagctatggctaattcttttttccagttaatttgtgtcacttataatgccacgtaagctgcctgtaagaggttgatgcccctttttgagtgctgaaggaaataaattcaggagtgggctttgctgagttctcattggttgaatttgctagcagtcctcttgatcccaatgtcagccagtaagcagagtctcaaaaccacaggttgctgggactacttgtgtacatgtgttgcatgtagtcccacgatgtccagtttgatggactctactgataaaacaccctcaaatcaaaccattgatcccagaggaaaatatgaccacatttatcttgtacaatttacccaaattgtccttgagtgaataaactggaaacagataccccagcaacagttaagtattctggattcctgggtgggccacagtgtgctcaccgggctcccatgattgcctcgcttatatgaggctgcgggttggccaagagcagcagatagtactgtcttctttgccctcctttgctgacaaggagaagccccaccctcttctttgtataattaacctcatttttctctggggcctgacatgatctattgaacccactgcaagttaagaattcacctgacaggttactctccctgaagcttcaagagataagaaaaattctaccccagggatgccaagagctgcaactcttagctcttcgtttgttcttggtgtatctctttagccctaggcatctttggcccctttgtccaatgggaagatccccctgcaaactcacagaatgttgtgaactccccgccaggctccatcttctttgcagtccagtacatccttctccaaagcctcttctgttttccaacctccaatttctgagcccatgcttagtgctctctccagaccctcttcagcagactggctcagaagggggtggaagctggggacaggaaccagagggatcgaggtatcccccaggattggcagtgggctgaatgttggagggaccctccttctggcaccaggattggatactctctgtacttagcaatggatagcaaagcctgattccataatccccacagactttttctcccctttcaagtcctactagtggagattagatttttctgttaaaaaattacatgaagacatcaaaaggagaaaaagaagaaagaagctctggactatgagaagtggaggcatttggggcatgcatcagtgtgtgaaccagttatcattttggggccactgtagagagaccagccctcagggttgaggaaccgagaactgggatgtgaccgcctacagcttgagctcattctcaagatgctaaagcactagactctgattcctgccactaagcagcacaagcatgtgggtgctccaggtgaccatggacagtacccaggtgtctgccgatcctgcgctgtgttttgagggatgggctcatattcagtgtgtgaaatcagacacaacctcccgtgggaagcagaagtgtgaggggaaaagcgtggtcagaaagcttaggtctgggcccagctccaccacctatgatctgtgtgatctcagggaaactacttatctccttgccttggtacaatgaaaaggttgtatagtggatcccagaggttctcagcctcgctcccattagaatcacccagggagcttttaaacactacttcgcccctagagagtgttgagtggggtgggctcgggtattggtatgttttgaaagctcctcaggtgattctaatgtgcagccagggttgagaaccatctgtaaggctttttccatctctaatgttttatgactctatgatcatagcatgtgccagggaggcatttcctctttgggttcctgttaaccacatctgcacctgtggctgtgggtgaggagtatggggcacccatatttggggaaagcagtgccgtctcttttaaacgtgcagtctctggaggatgagggtttgagtcctgggtcaggtcactgggtttcccccagataacatgggaataataacagtacccacttcattggggtgctggatttaaattaattcatgcttataaagtgcttaaaatgatgccttacacacagtaaaggcccaatgaacttcattattatcatggaggacaaatggatggaaagtggtgcacagaggggagtgttcacgtgtgttcctgagatgcaggtgaggctgggaagccagtgggcttgaatctcaggacgtctgtctggcagggcatgcctgggggcccgggacccgtactgtggctgggacgggaagcagcaacgttgcagcacactcgaggacagctccaacatgagcctctggacccagaacatcaccgcctgtcctgtgagaatccccttgtgtcctcccatctcagacccctccttcaattcaggctatgactccccaccaatattcccccaatcccctgagatcttatgacttccctgcccttggcttgggtaataggggtactgtctcccatgtgtgtcttcaggtgcggaatgtgacacgggatgggggcttcggcccatggtcaccatggcaaccatgtgagcacttggatggggacaactcaggctcttgcctgtgtcgagctcgatcctgtgattcccctcgaccccgctgtgggggccttgactgcctggggccagccatccacatcgccaactgctccaggtatgtgaggacagggtttacatggtgtctgccttggaccagggtggggagaactagggaaacggggacccctcacttgggtgtttgcactaagggacagaaaccacttcagggctgtgctagggactggataggtggctaatatctgaggcaggaaacctgagccctgagggagtttccacgctagtgagagagaagtttctatctcttggtgactcttgatgcaaagtggaatgctgggcaggcatggaggtcactcctagacaaaagcgtgcctcagtaagtctcatcccaaacatgaggaacagcatgggatgatggcaaggcaagcaaatctagtgccaattccggattgccactgtctggaggtgtggccgtggcctagccacctaaccactctaagcttctcttagtgagggttatagtacccacccaagagttgttgggagggttaaatgagataaggtatatacagagcttgcacagtgcctggtacctggggactccattagacactttttctttttttgagacagcgtctcactctgttgcccaggctggagtgaagtggtgtgatcatggctcactgtaatctcctgcctcaacctcctgattagctgagactacaggtgcccacaccatacccagctaatttttaaaaattttttgtagaaacaggagtctcactatattgcctaggctggtctcaaactcctggcttcaagtgttcctcccacctcagcgtcccaaagctctgggattacaggcataagccaccacacccagccttggacactcttaaaaaaactatttcatacacatttattaatgtagccctcacagcaacctcatgggggtaggaatacaatcattgtccttactttaaagttaagagtactttaaagttaagttacagaaggttctagtaacttgcccagggtttcacagccagcaaatggtagagcccagatttgaaaattggcgtcagagtaggcatgagtgagcagtgtctgaggctggagcaaagcatgtgcaatatagtacaggggacagagtgttggttacagtgcaaggattgggaccagccaggaaggctgaaagggaggctgcagactggaaaggggactagggccttcttctctaaagagtctgcccttttggcccttgtgagatggggccatgtcctacctctacgtccttagtcctgagcacagcatgatatatagaagaaggctctcaatacatgtctgaaggaggaataaatgaacggatggatgagcgagtctgcctgagatgacctgtttaggagaagatatttctatgtcactgtccagccctttctgacagcagtagaaaatacatcggcccagagacagactagatctaagaagctagggctcagaggggcatctgtctctgtcccctcccaccccgccaggaatggggcgtggaccccgtggtcatcgtgggcgctgtgcagcacgtcctgtggcatcggcttccaggtccgccagcgaagttgcagcaaccctgctccccgccacgggggccgcatctgcgtgggcaagagccgggaggaacggtgagggagaacaggcttgctctgaggtcccagactaaccgggccccccagaaagtggcctggattctcctcgtgatcccggggactctcgtcctttccggtcttgcactcccagggacctctcgtcagggaagggggtccccctccctggattgacgcctctcccccgaccccaggttctgtaatgagaacacgccttgcccggtgcccatcttctgggcttcctggggctcctggagcaagtgcagcagcaactgtggagggggcatgcagtcgcggcgtcgggcctgcgagaacggcaactcctgcctgggctgcggcgtggtgagggttggggccgtgggccaggggcgcggtgtagggtactggagccgaggggagggcgggcctggaggccgtggggttctaaagctgcctctgccgccacccgcaggagttcaagacgtgcaaccccgagggctgccccgaagtgcggcgcaacaccccctggacgccgtggctgcccgtgaacgtgacgcagggcggggcacggcaggagcagcggttccgcttcacctgccgcgcgccccttgcagacccgcacggcctgcagttcggcaggagaaggaccgagacgaggacctgtcccgcggacggctccggctcctgcgacaccgacggtaccccgcgcccggcgccccctccttcctctctcccagccccggagcggtgagggcgggggcgggagccccggggaggcccaggccggggtcggggtggccgggcgcccagtcgctgaggcctagcccctccgcagccctggtggaggtcctcctgcgcagcgggagcacctccccgcacacggtgagcgggggctgggccgcctggggcccgtggtcgtcctgctcccgggactgcgagctgggcttccgcgtccgcaagagaacgtgcactaacccggagccccgcaacgggggcctgccctgcgtgggcgatgctgccgagtaccaggactgcaacccccaggcttgcccaggtaaccctgcacggaaggaatccttggcctagcgaaaccctgtcatcctggaggcccccttccccgccccaggcctacccaggaaccccaatgcccaggtgaccccttctccctgccaactctgtgctagggacccccagagcaaatttctgccccggccgtagatgcaatggctactccggtggagtacggcctcaacttatcctccctgtccctttttttttttcacctttcttagtgagttagacaggtaagaagcttgattggaggtggagtcggtctctctccctccgggtgtctctgctgcttcctgcgtttccctcacctgccgcatggagtgggggcactccctaacagtggactgttgggtggcgggtggatcgggtggatgttgaggtcactgtggctcagggcagagtggtctgggctggtatgggatggaagaccgtcttgggccctggctgcccctacagcccctcacacaccccgtccccttgcagttcggggtgcttggtcctgctggacctcatggtctccatgctcagcttcctgtggtgggggtcactatcaacgcacccgttcctgcaccagccccgcaccctccccaggtgaggacatctgtctcgggctgcacacggaggaggcactatgtgccacacaggcctgcccaggtatgaggcacatcccgccagggctgggaagcgacatggagccctctgatccccaccagggggtccctgggcagttaacctcatcctacccacaatccccagaaggctggtcgccctggtctgagtggagtaagtgcactgacgacggagcccagagccgaagccggcactgtgaggagctcctcccagggtccagcgcctgtgctggaaacagcagccagagccgcccctgcccctacagcgagattcccggtaggtacccctgccagcacctgcgcagcaacccttcccagcctgcactcccaacttccttctccttctgaagcttgtgtcctggtggggagcagggggcacaggatgaaacatggaagtggggggaaggagatgccgaaagaaaactcccatatttgcctccatgcacacatttggggtttgggccctcctcatcctgtggatgggctagcccttctcagaggtggggtctgaggagagagggaggggaatgaaggcccccacgcctacctagtcctacgtctgagcgttgacctagaggtcctcccaggcttacgcctaccctgcagggcccccctcctctcgtctccgcccctgacaccctgtccactggtcttcctgcagtcatcctgccagcctccagcatggaggaggccaccgactgtgcaggtaaaagaaaccggacctacctcatgctgcggtcctcccagccctccggcaccccactccaaagtctggactctttccacatcctgctccagacagccaagctttgttggggtccccactgctttgagatggtgtgtagggtggtctgggcagttccctccatgccccccccagctaggaggccatcatcagtctgtacccaaggaagagtcatctgactctagaccctctggttgccacctctgacttgagccacagggtaccttgtgaaagaggtccccagtgacagcctccccagcctccctgtttcctttggctgtggcctcagagccctttccaggatgcctcagagcctcctgttgctgtttctgctcccagggaggcaggcaggagtctgtcctcttcacagtggccctcatcttactacctgcctctcttcccctagggttcaatctcatccacttggtggccacgggcatctcctgcttcttgggctctgggctcctgaccctagcagtgtacctgtcttgccagcactgccagcgtcagtcccaggagtccacactggtccatcctgccacccccaaccatttgcactacaagggcggaggcaccccgaagaatgaaaagtacacacccatggaattcaaggtgggagccttcttttttttttttttttttgagacggagtctcactctgtcgcccaggctggagtgcagtggtgggatctcggctcattgcaagctctgcctcccgggttcacgccattctcctgcctcagcctcccaagtagctgggactacaggcgcccgccactacgcccggctaattttttgtatttttagtagagacggggtttcaccgtttttagccgggatggtctcgatctcctgacctcgtgatccgcccgcctcggcctcccaaagtgctgggattacaggcgtgagccaccgcgcccggccgggagccttcttgtagaagcagagggcagggtaggagggcagggtgaagagtgcaggggttctggccctcagctgggtggaactgggcagtggtggtgtgaacagagcactggatccgcagtctgagtgttcttgcacggctggcttctggactccttgctctggcctgttcccttcccctgtgtgttccctcacccctttctctggttccttcttccacccacagaccctgaacaagaataacttgatccctgatgacagagccaacttctacccattgcagcagaccaatgtgtacacgactacttactacccaagccccctgaacaaacacagcttccggcccgaggcctcacctggacaacggtgcttccccaacagctgataccgccgtcctggggacttgggcttcttgccttcataaggcacagagcagatggagatgggacagtggagccagtttggttttctccctctgcactaggccaagaacttgctgccttgcctgtggggggtcccatccggcttcagagagctctggctggcattgaccatgggggaaagggctggtttcaggctgacatatggccgcaggtccagttcagcccaggtctctcatggttatcttccaacccactgtcacgctgacactatgctgccatgcctgggctgtggacctactgggcatttgaggaattggagaatggagatggcaagagggcaggcttttaagtttgggttggagacaacttcctgtggcccccacaagctgagtctggccttctccagctggccccaaaaaaggcctttgctacatcctgattatctctgaaagtaatcaatcaagtggctccagtagctctggattttctgccagggctgggccattgtggtgctgccccagtatgacatgggaccaaggccagcgcaggttatccacctctgcctggaagtctatactctacccagggcatccctctggtcagaggcagtgagtactgggaactggaggctgacctgtgcttagaagtcctttaatctgggctggtacaggcctcagccttgccctcaatgcacgaaaggtggcccaggagagaggatcaatgccataggaggcagaagtctggcctctgtgcctctatggagactatcttccagttgctgctcaacagagttgttggctgagacctgcttgggagtctctgctggcccttcatctgttcaggaacacacacacacacacactcacacacgcacacacaatcacaatttgctacagcaacaaaaaagacattgggctgtggcattattaattaaagatgatatccagtc

SEQ ID NO: 19 - DNA, 15932 bp, Homo sapiens
  DNA (1)..(15932): SULT2A1
acaacaaacatgtgacatgctgggacaaggttaaagatcgttttatccttgctgtaaaagctgatctgcctgtagctgccacagcctccagcggtggctacagttgaaaccctcacaccacgcaggaagaggtcatcatcatgtcggacgatttcttatggtttgaaggcatagctttccctactatgggtttcagatccgaaaccttaagaaaagtacgtgatgagtttgtgataagggatgaagatgtaataatattgacttaccccaaatcaggtaaggaggcagaatcgtgaactgagaaaggctgtggttgtgttcctgtccattcagtgcatgattggagttcttcctttatgtcagacagtgtacaatgctttaaggggaagagaggaatgcctaataccattgacaatcagagaaaaggatttagtcaggaaattacacagtaggatgagtgttcagaggggtaatctaaggtattaggagaatccacaggagtgaatcccaaggcaaattcaggtgtttgtttggtggcagtgggagggaggatggctgaggatgaccaatgatgtcctgaaagaagaaatagcatttaaatggaaatgcaaagaatgagtatgaaattacttggggggagggctattttcagataggagaatcatcagggcaatggccaggaaccacaaaagagccaggcaatctcaaggggctgaaagatgaggatcatatgtctctgggagtggggctgtgggtggagggcggtaagagcactgcggatgcggtgaggattgaggctgaagacattggaagtggcatggccctgagaggccaagagcaatgggaacataataagagggatttcagcaaatagccaaaagatggaagcaacccagatatccactgacaggtgagtgaataaacaaaatgtggtatatagctataatggaatgttattcatccttgagaaggaagaaaattctgatgcatgatacaacagagataaacatcaaggacattatgctaaatgaaataagccagtcacaaaaatacaaatagtgtgtgattccacttacataaggtacctggagtcatcaagtccatagaaacagaaagtacactggcggctgccaggggctgaagagaagggtaaatggggagtcggtgctggctctgcatagagtttcggttttgcaacacaaaaatcctctggagattggttgagcagcactgggaatatacttaacacttaacactacgaaaccgtaggcttaaaagtggttgacaggctgggcatggtggctcatacctgtaatcccagcactttgggaggtcaaggcaggtggattgcctgaggtcaggagttcgacaccagcctggccaacatggcaaaaccccgtctctactaaaaataaaaaattagccaggcgctgtggcgcacgtctgtagttccagctactcgggaggctgaccaagagaatcacttgaacccaggagatggaggtggcagtgagccaagatcatgccactgcactccagcctgggtgacagagcaagactctgtctcaaaaaaaaaaaaaaaaaaaaaaaaaagtggttgagagctggctgcagtggctcacgcctacagtcccagtgctttgggagggcaagataggcagattgcttgaggtcaagcgttcaagaccagcctgggcaacatagcaaggcctgatctctacaataaaattttttcaaaaaattagcccagcgcgatggcacatgcctgaggtctcagatacttgcgaggctgaagcaggaggccgaagtacaaggatcacttgagcccgagttcaaggctgcagtgggctataattgcaccactgcactctagcctgggctacagagggagacctcatcgctaaaaaaaaaaaaaaaaaaagccaggcgcagtggctcacgcctgtaatcccagcacttggggaggccgaggcaggcagatcatgaggtcaggagatcgagaccatcctggctaacatggtgaaaccccatctctactaaaaatatattaaaaaaaaaattagccagacgtggtggtgggcgcctgtagtcccagctacttgggaggctgaggcaggagaatggcatgaacccgggatgcacagcttgcagtgaactgagatcgtgccattgcactccagcctgggtgacagagcaagactctgtctcaaaataaataaataaataaataaataataaaaaaattaaggttgagatggtacttttttttgtttttgtttttgtttttttttttgagactgagtctcactctgttgcccaggctggagtgccatggcacgatctcggctcaccgcaacctccgcctcccaggttcaagcaattctctgcctcagcctcccaagtagctgggattttaggcgcccgccaccatacctggctaatttttgtatttttagtagagacggggtttcaccatcttggccaggctattctggaacccctgacctcatgatcacttgcctcagcctcccaaagtgctgggattacaggcgtgagccaccatgtccggctgagatggtacattttatatatttttttccttctttttccaggaacaaactggttggctgagattctctgcctgatgcactccaagggggatgccaagtggatccaatctgtgcccatctgggagcgatcaccctgggtagagagtgagattgggtatacagcactcagtgaaacggagagtccacgtttattctcctcccacctccccatccagttattccccaagtctttcttcagttccaaggccaaggtcagtgcataatggttaagacgtgtttgatcagtgcctttcaaacactgatatgcctataagtcatctggagatcttgctgaaatgcattctccttcaacaggtctgtgttgttgagacctgagattccgtattaggtgacacctatgtggctgctcccagaactgtccttgagttcaaggatatagaccattccacagattaccccagccagatttaaaccagggatagggtgaaaacactaacccagaatcttagaaaactaggttctaagtgcaatcagaatgtatagccatattatatactagataaccgcctttggttgccctaaaaaataattagccaatctgaattcaacaaatgcctcctgccacagaaaagacacagaggtgttcctatgggaagcagcatgttcatcaatcaatgcctgtatccaggttgactgccccggggccaggactgggctctgtacacacttcgtcttactgtgtgtaaatatgtgttgatatcagcagccacatgcatctcccatggggcagaggggtgatcacaagagggacaaggcatatccaggaccttgcatggctcagactgcttctagaattgtactttcctggaaggtgtttataggtgtgtgaattattattattattattattttgagacacagtctcattctgtcacccaggctggagtgcattggtgcgatcttggctcactgcaacctccacctccccaggttcaagtgattctcctgctccagcctcctgagtagctaggactagaggtgtgcgccaccatgcctggctaatttttgtatttttagtagacacagggtttcactatgttggccaggctggtctcgaactcctgacctcgagtgattcagcctcccaaagtgctaggattacaggcatgagccaccatgcctggcccaaaggacaaagtaatgtctctgaaatgtgtccatgatcttgggtgttgtatatggataatattgctatatatctatgaatgtagcttaatttatgaattcattctcctgttaatgatctttaaaccatagtacacaaatatacatcactcacctttggaaaccttccatgttcttcccattgtgagcagactgtaatatcccagagggaaggaacgatgcttccttcttccattgatatattcctagtgcagtgactacttcataggcacatcaaatttgattagtgagtgcagtaagtaatttgttaaaagaatccattgatattattaggcattatccaggaattggctttttctccatttttgtgaagatcaaaaagagtgaggattgactgtattgatttttcattctcccgtttttccatttaaggtgatttatctcatgagaaatcccagagatgttttggtgtctggttattttttctggaaaaacatgaagtttattaagaaaccaaagtcatgggaagaatattttgaatggttttgtcaaggaactggtgagtgtttcacaaaatatgggggtgcttggagtcttctagccgacctcttttgacacccagcctcacatctctacatctcaccaacccatgggttgaaaggctccaccacccctggaggccaaacctgctaagttcgcttactctcccgcatagcagcagaactctagccggcccctcagcttgccccatgataaaccatcctagctattttctaagtctctagagcctccaatactagcacaggaaacttatattctcctctagtctcctaatgctagatgtctggaagttagcttttcactggcttccgggacaacacaatcctgaccttccgccatttttttctgatgcctctttccaaaaccctcttaatattctgtttctatctgtctcagaactgattgcatgactctaggatcgctatatatttagttatgcagaattcctgggctttttcagtactttccattttgcaattgatctcaaaactctatgagcctctatctcagctgtgatgtgtctctctgcaatacaccagctacagatacctccattagagagagccaccaatgcctctaattcagtacactcaaatttgaacacctttctggctgggcgcggtggctcacacatgtaatcccaacactatgggaggccgaggcgggtggatcacctgaggtcaggagttcgagaccaacctggccaacataacgaaaccccgtctctactaaaaatacaaaaaattagccggccatggtggctcacacctgtaatcccaacactttgggaggccaaggcaggtggatcacctggggtcaggagttcgagaccagcctggccaacataatgaaactgtctctactaaaaatacagaaaaattagctggccgtggtggtgggtgcctgtaatcccagctactcaggaggctgaggcacgagaattgcttgaacccaggaggtagaggtggcagtgagccaagatcacgccactgcaccccagcctgggcaacaaaatcaaaactccatctcaaataaaaacatttgaacacctttcttaactgcgtggggtttatcttactccacccctcatgcaaagactagcatgagtctaatatttcataagcattctcttttcccatcccactcccctaggcccctcaccactttcctatctctaattattaattaagtcctaccatcttgattaatatcttcattctggtctcagcactttgggaggccgaggcaggcggatcacctgaggtcaggagttcaagaccagcctggccaacatggcaaagccctatctctattaaaaatacaaaaaattagccgagtgtggtggcatgtgcccgtagtctcagctacttggaaggctaaggcaggagaatcgcttgaatctaggaggcagaggttgcagcgagccgagatcactccatggcactacagcctgggtgacagagtgagactctgtgtcaataataataataataataataataataataataataataatgtattccatacttgacaattgctaagagagaccatcttaaatgttctcaccgccccgacaaaaaatggtaagtatatgaggaaatgaatatgttaattagcttgattctgtctgatatggttaggctttgtgtccccacccaaatctcatctcgaattgtaatccccataatccccacgtgttgtaggagggacctggtgggaagtgattggatcatagtagtggtttcccccatgctgttctcatgacagtgagtgagttttcacgagatctgatggttttatttatttattacagcttcaggttttttttttttttttttttttgagacagagtcttgctctgtcacctagtctggagtgcagtggcgcgatctcagctcactgcaagctccgcctcccaggttcacaccattctcccgcctcagcctcccgagtagctgggactacaggcgcccgccatcacacccggctaatttttttgtgtttttagtagagacagggtttcactgtgttagccaggatggtctcgatctcctgacctcgtgatccgcccgcctcggcctcccaaagtgctgggattacaggtgtgagccaccgtacctggcctaggttttttttttaattttttttattgttatactttaagttctagggtacatgtgcacaacgtacaggtttgttacatatgtatacatgtgctatgttggtgtgctgcacccattaactcgtcatttacattaggtatatctcctaatgctatccctccccctccccccgccccatgacaggccccggtgtgtgatgttccccaccctgtgtccaagtgttctcattgttcaattcccacctatgagtgagaatatgtggtgtttggttttctgtccttgcgatagtttgctcagaatgatggtttcccgcttcatccatgtccctacaaaggatatgaactcatcctttttcatggctgcattgtattccatggtgtatacatgccacatttgagatctgatggtattataagtggctggcatttcccctgctggcactcactcctccctcctgccgccttgtgaggaagttgccttgcttccccttcctccatgattgtgagtttcctgaggctcccccagccacactgaactgtgagtcaattaggccactttcctttgtgaattacccagtcttgggcagttcttcacagcagtgtgaaaactgactaatacactgtcattccatagtgtatgcgtacatcaaaacatctgttatatactgtaaatatataccatttgttggtccccttcgaccaagtttcattcaagttttatttgtcaatcatacgttaacaagccggtggggggatgaacataatagactggatgcctgctctcataaaatttgtaacctatcactttttctgccaccccatgcagtgctatatgggtcatggtttgaccacattcatggctggatgcccatgagagaggagaaaaacttcctgttactgagttatgaggagctgaaacaggtaatcccatcatttttagagtcagtgcacaccctctcaccaccatccttactttccttaaattccctccatcccgctgtgtcttcattccaccctctcagttaaagtggagcctggtgaagagtcacaaagagcaggattaactccctggtcttcattgccctgtttctggttgacccttgcccaagcttcacgctccttattttatcttaaaacatctaagccaggcacgttggctggcgcctgtaatcccagcactttgggaggccgaggtgggtggatcacaaggtcaggagttcaaggccagcctggacaagatgataaaaccccatctctactacaaatacaaaaattagccgggtgcagtggcgagcgcctgtaatcccagctactcgggaggctgaggcaggagaatcgcttgaacctgggaggtggagtttgcagtgagccgatatgccaagatcatgccactgcactctagcctgggcgatagagcacgactctgtctcaaaaaaaaaaaaaaaaaaaaatctagagaggttttttggcaccgggtgcagtggctcacacttgtaatcccagcactttggaaggccgaggtgggagaatcacttgaggctgggagtttgagaccagcaagactccagtctacgaaacagcaagactccagtctacaaaggaaaaaaaaaattagccagatgtggggggtgcacacctctaattccagctactcgggaagccgaggccaggggaattacttgagcccatgaattcaaggctgcagtgagctatgatcacaccactgcactccagcctggggcagcagagcaagacgccggctctaaaaataaaaataaggagcatattccatgcattgaggcagagtgtgatgtctcctgctagcactggtgtatgtaaacatttctctgggtgagacctatggtgctgctgataaccaagcgttgagagggcgctggaagagaggatgggactgggtagaagtgatttagttcctgagatggttccgagtgtctgacatctcagcttggctggtatgaacagaaatgaaggcatgtaatcaatttatctcactattctgagatccaagtactggagtgaatagtgacggagaggaaaagctgtccgatgatactcagaaccagcaagtattgaaagaacaacttgaggccaagctcagtggctcacgcctgtaatcccagcactggggaggtgaaggcaggtggatggcttgagtccaggagttcgagaccagcctggccaacatagcaagaccccatctctactaaaaatacaaaaaattagccgggcatggtggcaggcacctgtagtcccagctacttgggaggctgaggtaggagaatcacttgaacccaggaggaagaggttgcagtgagccgagatcacaccactgcactctaggctgggcaacagaatgagaccctgtctcaaaaaaaaaaaaaaagaaagaaaaagaaggctgggcacggtgtctcacacctgtaatcccagcactttgggaggccaaagtagggggatcacttgaggtcaggagttcgataccagcctgggcaacatggcgaaatcccatctctaccaaaaatataaaaaattagccaggcgtggtgttgtgcacctgtagtcccagctactcaggacccagctactcaggagaatcgcttgaacccaggaggcggaggttgcagtgagccgagatcatgccattgcactccagcctgggcaacagagcaagactccatctcaaaaaaaaaaaagaacttgacctattagtgatatctcacataaaagagaaaataacaccaacattggattttgtaccacctgggaaacgtcacgtcccaacaccttcctctggctcatcctctccaatcctctatggcctatggtctgggcatgaatttcttttttttttttttttatgaggtggagtcttgctctgtcgcccaggctggagtgcagtggcacgatctcggctcactgcaacctccgcctctcgggttcaagcgattcttctgcctcagcctcctgagtagctgggactacagatgcacgccgccatgcccagctaatttttttttgtatttttagtagagacagggtttcaccatgttgcccaggctggtctcgaactcctgagctcaggcaatcctcccgtaggcctcccaaagtgctaggattacaggcatgagccaccgcgcccggccatctttttttttttttttttttttagacagagtcttgctctgtcacccaggctggagtgcagtggcgcaatctcagttcattgcaatctccacctctccggttcaagtgattctcgtgcctcagcctcccaagtagctaggattacaggcatgcactacaacacctggctaatttttgtatctttggtacagatggggtttcaccacgttgaccaagctggaatgaatttcatttctgttaagaagccctttgtaacaagtttggttggctacctcagatacacgatcccataccttcctgggatcttcctttcggatcacacaatgaacttattttagttatttccatagttgtacatcttcttattagataaccaaggtttatgaaatagaggaaaaaattaaagcattatagatctaagagtaaggcctatgattcaaagcaaagtccttctggttacaataatccattttgttggccaggtgcggtggttcacatccataatcccagcactttgggaggctgaggtgggcagatcacctgagctcaggagttggaacccagcttggccaacatggtgatactccctctctactaaaaatacgtaaattagccgggagtggtggcgcacgcctgtaaccccagctactcgggaggttgagacaggagaattgcttgagcctgggaggcggaggttgcagtgagctgagatcatgccactgcactccagcctgggcgacagagtgagatcttgtctctaaataaatacataaataaaattttaaaaataaaaatctattaatctcccaggatcatgtacctagtcctaattattgagatgaaatataagaagatattgtaaaactctgtgtgttattcaaaagctagttatgggaaacagtactatctgacagtacagccaggatttgaaatcaagccttcaatctccatcagattctccctgaacctctccttgctaaccctaattactgtctagaagcctctctaaacgtctcttaggaaacccgaggctctgtgttttactgttaagttgtcctaaactctaccatacgggaaaatccacgatgatccttgcatcttttgtggttttctggttggttttgttttgttttgttttgctttgttttgtttttgagacagggtctcactccaacgcccaggctggagtacagtggtgcaatcacagctcactgcagcctcaacttcctgggttcaggtgatcctcccacctcagcctcccaagtagctggtaccacagctgtgcgccaccatgcctggctaatttttgtattttttgtagagacagggtctcactatatcgcccaggctggtctaaaactcccggactcaagtgatccgcctgcctcagcctcccaaagtgctggaattacaggcaggagccacggcgcccaacccatccttgcatcttttacatacttcatgccctctcttctttaccttttttctttctttctcctaattgcattcaactcaatcccttctcacatctgcatgttgttcctctcttcttcctcctcctcctcattctgcggttccctccttctcatcttacttttttctattgtctttttttttttttttttttttttttgacaaggtctcactctgtcaccaggctggagtgcagtggcgtgatctcagctcactgcaccctccacctcctgggttcaagcaactctcctcccccaacctcccgagtagctgggattaccggcgcccaccaccacaccctgccaatttttgtatttttagtagagatggggtttcaccacgttggccaggctagtctcgaactcctgatctcaagtgatccaaccgcctcagcctcccagagtgctgggattacaggcgtgaaccaccacgcccagccttgtctttctctttcgtatcctctctcttgatttttcttttttaggacacaggaagaaccatagagaagatctgtcaattcctgggaaagacgttagaacccgaagaactgaacttaattctcaagaacagctcctttcagagcatgaaagaaaacaagatgtccaattattccctcctgagtgttgattatgtagtggacaaagcacaacttctgagaaaaggtaaaagaaaatcctctggtttccaaatataccagaatacacggcatgcatgcctatggtcacaactgggcgctaacagttgagatgaaagagtgctttttttttttttttttttccgagatgaagtcttgctctatcacccaggctggagtgcagtggtgcgatctcagctcactgcaacgtccgcctccaggattcaagtgattcttctgcctcagcctcccgagtagctggaaattacaggcacacgccaccacacccagctaatttttgtatctttagtaaagacatggtttcaccatcttagctaggctggtctcgatctcctgaccttgtgatccgcccacctcggcctcccaaagtgctgggattacaggcatgagccacggcgcccggccaatttatcagctttaattgctcatcgcccagaacacttctcccgtggcctcagcagggagcctcttcttgtggtactgatgtgggctgtaggtgggtggggaaaattggttccgcccgggaaggttatctgacttacgtgaggtcattcagattctctttcctcagaatgtgacatgagcattatccattctacagacagtgagcaggttaactagcaacccttgctagacctacaagctgtgattcacctgagaaatgaggacaaggacggggttggggatggccacagtgcagctgccccactggtgagttagcatagagatctgtcctggatgggccgggtgcggtggctcatgcctgtaatcccagcactttgggaagccgaggcgggcggatcacaaggtcaggagatcaagaccatcctggctaacatggtgaaaccccatctccactaaaaatacaaaaaattagccgggcatggtggcgggtgcctgtggtcccagctactcgggaggctgaagcaggagaatggtgtgaacccaggaggcggagcttgcagtgagccaagatcgtgccactgcactccagcctgggcgacagagcaagactccgtctcaaaaaaaaaaaaaaaaaaaaaaaaaaagagatctgtcctggatgaagaaatgtgtgaaggaatgcctcacctggaaaagggagagaagagagactttgctatcacacgctgtaaggtgccaagatgaatggaaatgtctattgcatggggtgaaagaatccatttttccagggccaggcgtggtggctcatgcttgtaatcccagcactttgggaggccaaggcgggtggatcacctgaggtcaggagttcaagaccagcctggctaacacggagaaagcccatctctactaaaaatacaaaaaattagccaagtgtggtggtgggcgcctgtaatcccagctactcgggaggctgaggcaggagaatcacttgaacctgggaggaggaggctgcagtgagccgagatcctgccatttgcactccagcctgggcaacaagagtgaaactccggctcaaaacaaaaatccatttttccaaaatcctacagttctaatacatctgggacagtcctccgtggaagaaaagaattaaatccttcaaaagacccagagtcttgggcaatcgtaaaagtaaacgttggccgggtacggtggctcacgcctgtaatcccagcactttgagagaccaaggcaagtgtatcacttgagctcaggagttcgagaccagcctgggcaacatggtgaaactctgtttctactaaaaatacaaaaattagccatgtgtggtggcgcccacctgtagtcccagctacttggggtggggctgagacatgagaatcgcttgaacccaggaggcagaggttgcagtgagccgagattacaacactgtactcctgcctgggagacagagcaagactccatctcaaaaaaaaaaaaaaagataaatgctgagactttgtataacttatctatattagggatacataccatacacatacaccacagaaagaaaatacacagaacctgtcctacatgatatgtgttatgaggcgaaatacagcaaggatggggagtgacctctaaattgggtggtgagagagaacctcgctgagaaacttgaattggaataaagacttgaaagaggcaaataggcaagtcatgggccaatctgagagagcagcgttccaaggagaaggagcgtgggacgccaatagtctgaggagtggggatgcctgccacgtttgaggcagaatcagaagtccccgtgtgagtagagtgacggagagggtagttttaggggatgagctcagagaagccacaggggctggatcacctggagccctgtaagcgcctccagcacttgtacttgagtgaaacctagagtcctcggaaaatctgagcagagaagtggcatgatctgggatcatgagggctgccatgctgagactaacttatgaaagagaacttatgaaagcagaggccaggccgggtgtggtggctcacgcctgtaatcccagcactttgggaggccaaggcgggcggatcacctgaggtcagaagtttgagaccagcctggccaacatggcaaaaccccatctctactaaaaatacaaaaattagccaggcgtggtggtaggcacctgtaatcccagctattcgggaggctgaggcacgagaactgcttgaactcgggaggcagaggttgcagtgagccaagatcgcgctactgcactccagcctgagggatagagcaagactccgtctctacaaaaaaaaaaagaaaaaaaagcagagaccagttacaagtgtactctaataatccaggtgaaaaatgatgttggcttgagtcaacgtggtagaaacagaggtggtgagacgtgacttgattctggacatatcagatgatatactggcgttattgctgaggaattgtacacaggatggatgggagaaaggagaaaataggaaattgtttccagctaggtgaataactatgtgaccaggcaggataaaggcccaccacgaaccatcggccattctgctatgttagctacaatgtccatgtcaggtgcctggtggagacaggtcaaggagatgtgtggtctgacctgagtttctgcttcttgtttccaggtgtatctggggactggaaaaatcacttcacagtggcccaagctgaagactttgataaattgttccaagagaagatggcagatcttcctcgagagctgttcccatgggaataacgtccaaaacactctggatcttatatggagaatgacattgattctcctgtccttgtacatgtacctgactggggtcattgtgtaagacttattattttatcctgaaaccttaaatatcaaacctctgcatctctgatcccttccttgttaaaagttaccagggttggccaggcacggtggttcatgcctgtaatcccagcactatgggaggccgagacgggcggatcacgaggtcaggagactgagaccatcctggctaacacggtgaaaccccatctctactaaaaatacaaaaaccaaaaaaaattagccaggcgcattggctcatgtctgtaatcccagcactttgggaggtcgggggggtgggggaggatcacggggtcaggagatcgagaccatcctggccaacatgatgaaaccctatctctactaaaaatacaaaaattagccgggcatggtggtgcacgcctatagtcccagctactcgggaggctgaggtaggagaatcgtttgaactcaggaggcagaggttgcaatgagccaagatcgcgccactgcactccagcctgggtgacagagcgagaccgtctcaaaaagaaagaagtgactagggttcagagaaccagggttcaaagcccagggatgcaaaggttgcagtgagttgagtcatgggatcccagacttttttaaatgtttgcaatgtttcccgtttacagaatgctacaagaataatgtacgtactacctaaaaggatgtctaaatgtttgttaataaaaataagaaatagctacagtgacagattttagagcaaaaattagtaataaaaataagaaataaaattacaggagcaattaaggttccatttcttttcatcacatgtatctccacaatttattattgctctgatcttaaggagtgtaatttgcaatctaattttatcctcttactctgtgttgttaaaccatatacaataaacggtgtttatggag

SEQ ID NO: 20 - DNA, 4254 bp, Homo sapiens
  DNA (1)..(4254): TFF1
atccctgactcggggtcgcctttggagcagagaggaggcaatggccaccatggagaacaaggtgatctgcgccctggtcctggtgtccatgctggccctcggcaccctggccgaggcccagacaggtaaggcgtgcttcttcctgctctgtggggccacagccagctctggcagcctccgccaggagccactgttttacatacatatttttgagcacctgttttgtgccaggtgctgttctaggcccttaaaagtatatccaatttacaggatcggcaaaagcaggtggagagtaactcagggtggcagggcccccggagaccttcgagaagtgcgacgaggagggggctgccttcagtcggggctgttttcctgtgttaggaagactatacaatcctcccaagtgtcatgtttcaaagaggaagtgttggcgtggggtctcagaatagtgcttttgactgttcatgccaacatctcccccaggggcagaccctcccaaggcccatccagataggcccaaatgccggtcccagtgatggccacctgggagaccctctcccacaggcccgaatgcccgtcccagtggtggccaactgggagaccctctcctacaggttcctgggctcccctgggatccatgctctgggagtcaaagccacctctctcatgagtgcgtggctggcaacccatattccctggtgttgtcaagtggatcggttgccctgggtccttctagggagtggaggaggaggccattcttgcttccttgggaagtgtttgcatctcaactcctttacctgcagaatggatcaacggtctgccctagggctgtcaggaaatgctgtgtggcagcatctgcgacttgcactttgccagctgtggggagctgaataacttatttgccgttattaggtacagtttcaaggtgggggcaggagaaagggctttctacgtttccaaagcaagggtttccagagaggcctgaagagggagcgcccagtggtgctgtccgtgcccccactgccctccagccacctcttgatctctgctgtggggtaccgggcctgaggggtgggcttgggcagcgtagaagagcagccagcattgggctgcagtgggaagacccccaagcccatggcagggagcgggggagctttggaacccgagagaggaagtggcctcggtgtacagaacgaactgggtgggtccccgtgctggccacccccaggcccatctgcctgcgcccttgcccccaccccagcccccagctctgccccctgtgctgtgggatcacagaggccgtggcaaactcccctccccaccccacacaccctctggctcaaggctcagagcgtctttgcgggtcactcaggtccatgatcctgttacaactgaaatctagaaaattgtgattacagtttagtgcattcgtgtgtggaaaccatttccatttatttccatcatgcgacaaagacaaagcgggtgggcaagacagagtctgccggaggcagagcaccggggctggaaatcttcctccctgaggaggaaacccccccgacccccaggatgatgatcctccctcaccacggggcctctcttgacccccacagtgtcccgggggtgggcgatgatcaccttcacgtcgcgatggatccagaccccaggagggcaaggttcccatggaagctgctgggcagcgggagctgaacacggatccttcccagcaagccaggaacactttctccaaagacatctcgaggcagtccctgatagcaaagcagacaagagaacagcccctctcggcctcccctggggcgccctcacctgagccagtgtggccagactgagttcctcccctcctatgccccaaggcagggacagggaccggagggtgctctgggctcctctttcaccccctgctgcaggctgtcaaccaccagatcctaataggttgctttctgagacctttgattccgcggagctcagagcctgaagctctggtgttagaacctcttgcataagatcctgcggcagcccccagccagccccatctgtccacgtgtcttcctcctctagatccctttcctcactgccctgcttcaagctgtttcacagcttgtaccctctgtcggctcctcctagaccaccccacccggtcctctcaccttacctgcaatgggtttccacctcctgaacacacctgggtctctggaatggcctttgcccatgcggctccatcttcacctggtgaacctcctcctgcagggagcccccctgctttgttcaacctgcttgtcattggcctctccggggagtgccctacccccgtggttaccctgggcaccctgggacgatggccttgcgttgtctcgcacatgttcttgcctttctcctccatcagatccttagactcttttttttttttttttgagatggagtcttgctctgtcactcaggctggagtgcaatggtgcgatcttggctcactacaacctctgcctcctgggttcaagtgattctcctgcctcagcctcccaagtagctgggattacagacgtgtgccacaatgcccgcctaattttttgtatttttagtagagatggggcttcaccattttggtcaggctggtcttgaactcctgacctcaagtgattcacctccttcagcctcccaaagtgctgggattacaggcatgagcctgggcccagatatttagactcttattaatgacttctctggttttaatttctgggtctctctcacctggcacagtgcctggcttttgccatgctagctcccacttctcatgcacacaaatggtgctcagtaaatatttatgtattgagtaaaatttaataatcatttgttgaaattaaaaagtgaataaataagttacctagaaagatgcaaagtccacaaacctggggcaccttgcattttccctgagcgtaatgtttgcacatcaggatgtgaggaccacgtctccctctcatgtcctgagggttttatatccgcctcactggacagttgctgatgtcattggagaaggaagctggatgggtgtgtgcatgataacatcaaggaattcagcccacaacttactttgcttcttacctgtgcactttcagagacgtgtacagtggccccccgtgaaagacagaattgtggttttcctggtgtcacgccctcccagtgtgcaaataagggctgctgtttcgacgacaccgttcgtggggtcccctggtgcttctatcctaataccatcgacgtccctccagaaggtatggcctttttatacgatgggttctgaagatttagaattagttagaaaagtcatttaagactacagaggctctgatcagcatcaccagctatgcctttacacagagtcacggccgccagtggtggtgcaatggggtagcctgagtcaggctgcattcaggtccaggaatagaaaggcagggctaagggacttgggaagaaacctgatttccccccggcttctcttcacatctctaaccaaaagcctgggaagagccactgttggtaacgctttctagcttgcctaggatagagggggaaggcatgacgaaatctgaagacatttcatgtattctttttttttttttttttttgaaatggagtctcgctccgttgcccctgagctggagtgcaatggtgcgatcttggctcactgcaatctctgcctcctgagttcaacctcagcttcctagtagctgagattacaggtgtgtgccactacgcccagctaaattttttttgtatttttagtatagacggggtttcaccatgttggccagaccggtcttgaactcttgacctcaggtgatctgcccgcctcagcctcccagagagctgggattacaggcgtgagccaccgtgcccggctgacagttcatgttttctaaagaatgtgcctatggatactttaaagtaaaaactctgtaattgtttaaatgtgaaagaaaatgtttatcctcactaaagcatctctttctccctccccctcacccctgtagaggagtgtgaattttagacacttctgcagggatctgcctgcatcctgacgcggtgccgtccccagcacggtgattagtcccagagctcggctgccacctccaccggacacctcagacacgcttctgcagctgtgcctcggctcacaacacagattgactgctctgactttgactactcaaaattggcctaaaaattaaaagagatcgatattaa

SEQ ID NO: 21 - DNA, 13599 bp, Homo sapiens
  DNA (1)..(13599): VILL
ttgtacaggtagccaggtgtcggtctccagcctgagaactctggctgttgttccttgtgtcgtcccatattcctgcctggcctgcgatggacatcagcaagggcctcccaggcatgcagggaggcctccacatatggatctctgaggtgagaggcacgaccaaataggagagttggtgacatggaagagcgtggggttttccacactaggcttctcccgcccccaactcagagcgtcctcttccaccccaccccagcgggtgtcatgggtagaggcctcctgagttgttacagggaactctcctctcccagaaccggaagatggtgccggtacccgagggggcttacgggaacttttttgaggaacactgctatgtcatcctccacgtgagtcgcttggggaagtctgcctgagaggggtggcatggcccggcactggggagactgaggcacaggcataaactctgccctgggaagcggcaagttgagagccggagaatcacatcccacaagggggcggttaccgttgaggcttcttagtccttccctcccacttcctgatctccgcggaagcccctgcctagcgtctccccatggcccttggtacatcctccccttctccacccgcacctccgtcttccccgcaacacatatacacaaacacccggaccctaggtcccccagagcccgaaggccacgcagggggcgtccagcgacctgcactactgggtcgggaagcaggcgggtgcggaagcgcagggcgctgcggaggccttccagcagcgcctacaggacgagctggggggccagaccgtgctgcaccgcgaggcgcagggccacgagtccgactgcttctgcagctacttccgcccgggaatcatgtgagtgcgggggcgaccggggcaggagggagccgtggaggcggtgccttggctggggcagtcttgggatggccatcgtccacatccctgaatggggcaagccgggaggggttgggtaacacctttattgagatacaactcatacgccatacgattcacccatttaaagtacatatacatgtcagtgatttttaacagttgtgtgcaaccatcaccacaattttagaacattttcatcaccctaaaaagaagccccatacccctttgccaccactccccatttccctccaacacccccatcccctgccctaggcaaccactcatctgctttgtctatacatttgcctcttccgggcatgtcatagaaatagaatcattcaacaaatggtcttccctgacgggatctttttgttttaacacactgttttcatggtttatccatgttgtagcatgtgttattacttctttttattaccaagtaatattgcattttatgaatatactacattttatttatccattcatcacttaatagacatttgagttgtttccactttttggctgctatgaatctgtttttatgaacatttgtatacaagtttttgtgtggacaaatgttttcatttcccttggtatatacctaggagcagacaccaatgttgttttgagtttgcttttatgttactgtgctggtaggaatatatctttcgctgtaaattgcttcacaggtgttttaaattaacactagcaatatatttggaaatataggaaattgctatttgatcatttccatttcatacagttgaacctatatatgcatatagcatatacatgaacacatgcacacaaacatatgcgcagatgcagaaacacacaccaccctcatgtatgtccacctatagatggacatgtgtgaatatccatgttcacctacacacatatatgctgttgcccaccttcatgcactcaccatctagacttacagggataaacaaatacacagtgtgcccccaaatgtatgtacatgtacacatatatgcatgtgtccacatgactacgcatggaagtgcactacacatggaaatgaatgcacactcatgccctatgtgtgcacccatgtacttatacatacatgtgttcacacagactccagtgcatgtatgaagcaggcacatacgtgcacgtgctcacatctgcagtcattcatgcacatggcagtctgtgttcttatatacacagaatgtatataccctcctgctattcccacctcagctacaggaagggaggcctagcatctgacctcaagcatgtggagaccaacttgttcaacatccagcgactgctgcacatcaaagggaggaagcacgtgtctgccactgaggtgaggctgccaggggagcctcttgacctctgaactcggctcagactgggtgtactgaggtataaggaggttggaaattggctggggttgtggggaacaaggagctgtcagcattcccagatggtcttgaatgaggagaacagagaggacaccaggcttctagccccacttctgccactgctccccggaccttttgtttatgcgtctatctcagggacatattgagaacatgggcacagctacttgggaggctgaggcaggaggatcgcctgagcccaggagtgattcatgatgacaccactgtactccagcagcttgggtgacagagaaagaccctgtctctgaaacaaaaaaagaacttgggcagatggggcagatgatatggcgcctgtgaatggtccttgttagcagcacagtgagaggtggtgcataacctcgcactctctcacacacattgtcattgtcacctatatgcacacacactgtctcccactgttatccccgggtgctcctctggtccatagagtgcccttgtgcaaatcagaacagtgcccctttcttccatctgtcaggaaattacaggaaaatactggttttgttagaacaaaacattttgctgccatctggccagaatttggtgtaatgaacattcaggtgtacaacgtctacagtgtgaatggtaacccttgaggtatgcaagtgagtctgcataggcagcctgtgacacagagacaatcccacataggctctgcatgtcacccacagacccagtgaccatacatctctggtcattcagggacaccatgaagccccatgtttctcctattatcctggcataattatctaaagtactcccttttactctcaaaagtgtgtccgtttggagactatcttcatccataggtattcactgtcaccataagcacacttcttcacatgtgatgtccccatatacatacatgtgtatatgcacacacacaaaagataaacagatacaccccacctgtatacatgtgtacatgtatacatgtacagcaacagacatgcactgagtgagaagtgtcataagtcatgtacaccctgtggaatgcagcattatctacagtcacacatgcctacgtacacccagtttgcatacagcttcatgcacacgtgacacatcccagctatgctcccctctagcggatgctggtggtatgacactctgtctctctccctggctctggcaggtggagctctcctggaacagctttaataagggtgacatcttcctgctggacctaggcaagatgatgattcagtggaatgggcccaagaccagcatttctgagaaggctcgggtcagtgtctgcccaaggaactggggagtacggggcttgggcggggaatgatcctccagttgaccatcctccggccacccaaagagttgggcttggctctgctacaacccaagaaacgcctatgagttacaagctgagttcagaccctgcattgttggtgtccccctggatgccaggatgaggggacatcagcccttctccccatcagcctctgggagctgagcagtgacaggagaagtctctgctgtgagagggcacactggtgacaccctgactcccaggtcctctcccgcaggggctggctttgacctacagcctccgggacagggaacgtggtggtggtcgtgcacagattggtgtggtggatgatgaggccaaagccccggacctcatgcagatcatggaggctgtgctgggccgcagggtgggcagcctgcgtgccgccacgcccagcaaggatatcaaccagctgcagaaggccaatgttcgcctgtaccagtgagtacccctggggtgggcaggggtgggtgggacagtccaggactctgtgtccatcactactgcaataacacggcatctctagaaggccctccagcaaaggctgctgggtttctgggacaggtcatgtggaccgtgggtccagcctgtactcttccatggcatgtggctgccttgctgagaaacctattgtacatacagggggactgtggcgccctgccagggccagggagctgcctaaagctccacagcaaggctgcagtaaaagtgaagactacaactcggggccccagcccccatgccttctgtctctgagggactggggtggggtcctaaatggggctggagtggagacagatcagggaggggctgggctggccactcctgggttcctgtccccccagtgtctatgagaagggcaaagacctggtggtcctggagttggcgacccccccactgacccaggacctgctgcaggaggaggtgaggaaggcctggccccagctacttgcatccttccccatccacaaccccagcccagtctggaccacctactgaccagccccacccttgctcccaggacttctacatcctggaccagggtggcttcaagatctatgtgtggcagggacgcatgtctagcctccaggagagaaaggctgccttcagccgggctgtggtgagccctggggctctgtctgagaggaacagagcactgccctggggtctgagtggggaggcagctccgccccagggtctaagggaggaatcagccctcccctagagtttgagttgggaaatcctatgctggagtcttaaaggggaggtagccctgccctgggagccctgagagtaaagaccaggtggcctctgagaaaccatgtgtaaaaggggcacgtggccctgccttcaggtctggggccctactgactgggcggtcccgctttctgagggtggggctggggaggagacagggctctctctgtctggggtccgtgagggttgacatggcctgtcctgcacgaggcctagactaagggggccctgcctgccctcagggacctcagagaagtcggtggtgacagagtcaattcgctaagtgggtcatgagctcggttaattaacgcttcttggagctcggctgtcccagagcggtaggtccccaggagcggcagtggggcagtggactctcagggtcgcaggactgacgatgccttccgccccagggcttcatccaggccaagggctacccgacctacaccaacgtggaggtggtgaacgacggcgccgagtcggccgcgttcaagcagctcttccggacttggtctgagaagcggcgcaggaaccagaagctcggcgggaggggtgagcgggcggggcggggctgacgggggcggggcgggactggcgggggcggggcctggcaggaatcggcaactcgttgggatgggtgagcgggcggggcggggccggagggggcggggcctggtctgcacggggcggaacagagcctcaggatgaggaaaggggcgtgggctgcggaggacgcggcgggacctggaatcttggagggatggttgaggagtgggcggggcggagatggtgttgggggggggcagagggcgccactgacgcctactgtccccccttcagataaatcgattcatgtaaagctggacgtgggcaagctgcacacccagcctaagttagcggcccagctcaggatggtggacgacggctctgggaaggtggaggtgaggggtactgggttagctgggggaagatgggcacacggaggtaagctttgcctacaggtaaacggtatgactgctatctaaagtgacccaggtgcacatccacacacaatcagggacacaaagggacacgtgtacatttacatactctcctagcaggcagttcatacatagtcacgcctaatcatacacagccacgggcactcacacaacacagacacacagtacagtaacacttggacacttaaattctccctgtagtcacatgtaggacaaaatcaaacatatgcttatacagacacacatactaacaccttgtaattgcacataatcacagccaagtacacaaccacaaatatgaagctgcaaaaactctacatcagacatgaccacggtcacacacaaccatcaatccgcagagacacaccaacacagacacacgatcacacatcatcaattacagccccacacacccaaccccaattaacagccatacactgtcaaccactcatctggtctcagcccagtgtcctgcgagacgcaggggttgagggctacttccaggctctgtagagggtgtggttgtatcttgacttgttggctgaccccctaggcagagccctgaattttttaggccctagtttttaaataaagtggggtcagaaactgtggtcccatctggccccaaggctgatgtggggatcctgtggtcttgtgggaacagaactgctgggcctatgcgaggggtcctagttctcgaggtaggtggaggtcagagaaaaggcaagatttccttcttcctttgccctaatatggatggacagaagtgatgagtgggaagagactgagagaggaggagatggggcaagggggaagaagggggagacagggaaagaggaagacagggaaggagcacaaagagagacagagaagaaaagactgggaaggacaggggatgaggaggaggcagagggaagggaggaggaggtggggtggaggaagagcagggagagagggggtacagggagaagagagggagggtcagtgatagatgggatacacagagagagacagagagccagacagtgggagagggagacaggaaagcagaaggaaaggcgagggacggagggaaagagagccctgggactcaggtgccaagcacaaagtcagggacaggatccctcctggtaggcagtggacaggcaggcagagacagggcctgagccaggggtcctggctgcccggtaattgccactgttaggtggcctgtagtcaagtcagccacttttgtgaaagacagggctctggctgctctggtctggaggtcggctccccagggacaactgtcagggtcagtgtgggaaaggacacccaggcattgtctcctgccatgcagaggtgaggtaagggaggcgtcatcatccccaatatacaggtgggaaaggcccgaagcttagaacaatgtcactgccaacacagggcctacctgggatttgaccagagtccgcctggctccaggctctgccacccacaggaagaagaaactacactgacagatgtgagacagtgtttccccttcagtctttgaacaggctttgtgttttctaaatgacactggataaaagggaattcattcaagagctccaaggcttccctttccgcccggcttctgttgccctggcctgagcagcgagcagctgggaggggactgaactgcccctaaccagggttgtggctggtggggttgggactagggctgggcatgtggctgggattgggcccatctcccaagtgtggtgggtttcaggggtccgtggggaaagggtcacctgcagatccttgtacaaagcccagcacaaggcccagaatgggcctggagctgagggtgggcccctggcctgcgtggatgaggaaggcctcagaggctggggagagctttccggttgggtacaggatgggtgggctggttcaggaagagcagccacctgtgcccattggtcccttattccccaggtgtggtgcatccaggacttacacaggcagcccgtggaccccaagcgtcatggacagctgtgtgcaggcaactgctaccttgtgctctacacataccagaggctgggccgtgtccagtacatcctgtacctatggcaggtgtgccagcctgagggaggcagcactcaccttaaagcccaagggctgggctctgggagtgaaatgtgagagctgggccaggccctcactcactgcccccacctgcagggccaccaggccactgcggatgagattgaggccctgaacagcaacgctgaggaactagatgtcatgtatggtggcgtcctagtacaggagcatgtgaccatgggcagcgagcccccccacttcctcgccatcttccagggccagctggtgatcttccaggtaggtctcaccttgccactctggccacagcctgcccagttctgcatgggccatggcccccgcacacacttctaagcaccttctctttgggcctggggcctgcttatcatcccctagtttcccagagcttgtccaaggcccaggagctccaaggttggccccctgcctgagtttccctccccagtcccagagccagatgaggaatttgagttgaaagggagccaggggcttgcctggggctgcacactagcaaacctggtccccactttccacctccaaggcctgagcacccatgccccaaccactcagagatggggggaaaggtccatttaaaaagggtctgtccctgtcccagactgatgggattcctgcactccacacttagagggtcctgtactcctcatgtgaaatcaccagtgagggccttgatggcttcaagcaagggtccctgagctctgaggcaatatgtcccacactgggacaggaaggcgcccctgggagcccttgcccagcctgaggccttgctctcctataggagagagctgggcaccatggaaaggggcagtcagcatccaccacaaggcttttccaagtgcaaggcactgacagccacaacaccaggaccatggaggtgccagcccgtgcctcatccctcaactccagtgacatcttcttgctggtcacagccagcgtctgctacctctggtttgggaaggtacccacagcactgaccacttgattcatgcccagatgtagtggtgccaggctgggggtgggtcctctccacagggcatgcagactttgagtccagcctcagataggccgatggggggaatggggaggggaagaagccacagggtcccctctagaacttggggaaagttacaaagtgacaggtggacctgagagtccgcaggtcagagccaggcccaggccgcctcccctccttactgcctggagcacagggcatgtcccttcccaggtctcttgggaaaaggggaggcctatgccagtttgctggagttttctctaatattcagcataaactatgactgaccctctaagcctgggggcctcctatcccatgctctggaccctgcgagggtcccagaccctgcgatccagatcaactggggacacaggcctgtagggtgaggaagatgccttgttcactggtgtcctgctgtcagcttaggcctcctgtgacttgggcccagccccaccccatacaccctgtgaacgggacgtggggccggaggtgaaggcccctcctcatgcagggcctgagccatctctttgcctgctagggctgtaatggtgatcagcgtgagatggcacgggtggtggtcactgtcatttccaggaagaatgaggaaacggtgctggagggtcaggagcctccccacttctgggaggccctgggaggccgggccccctaccccagcaacaagaggtaacagggttgggaggagagtgttcttacccagaggaggaattgaggcccagagaggagggtgggtgactgggattcacacagagagctggcaagacgagactagaaccaaggactctcagtttcccactcacagaggctcccacaagtacagcccacgcttcgctcccaggcctgggtaacttgcgtctctcagatgctggggagagtgggggcagtggcgacctctgctggcagcatcccctccctgcattgtcctggtcctgggccaggggacaaagcacccttccccaccctacagtcctcagggatcacggtgcccagtgtgtgtgtatacagtgtcatatgatgtgtgggtatacagtgtgtgtggatgtgcaagaacaggtgtattcagggtgttgtgtgtggtgtgtaagtggacagggtgtgtgtaggaggtaggagtgaggcctcaaggggaggagggagctgagtcctggtcgctcttggtctgcctgtggggcttggtttatgtgctgcactccccacaattctcctgagctcagtactcccgtctccttctcccagcctggcttgcctccttccactttgggccggagacctactctctgccaggggtgggctgaggagctcctcccatcccagggagggcgagactccagctcaggccctcccctacccctgcagccctctcctagggaaattcatggggcaccttgcgtcacagctgggtggggcgagagctttctccatgagcagagagggaccctgtacccagagcagagcggagtgctcggggagaaaccacggggctcagaggagggcccagggctcccactcctgagaagtggcttcccaggccctggggtggggcacttgtgccatgggctggggtgcccctctgggtggctcacagccttgctgtccgtgctggccaggctccctgaggaggtccccagcttccagccacgactgtttgagtgctccagccacatgggctgcctggtcctcgcagaagtggggttcttcagccaggaggacctggacaagtatgacatcatgttactggacacctggcaggaggtaaggtggccatccctgcctggtggggctgtgaacgggggtgtgtttctgtttgtgtaactgggtgtgtgtgtatctagccatctgcctctgtacacagggctgtgggtgagtctgaccctgtcactgagcaattgcattgcggtgcatatgagaccatggatgagtgtgcatcaccaggtggcagcagtgagactccgggagattaggagtgtgttggaactcaggggtaactgagaccatgtttgcagttgtgtgtggccctgtgtgccttatgatactatgtgtggctccagcgacagtgcctgcggccgagcatgtgtcggtgctgcatgagtgactgtgattggaatgcccaatcgcatcattcatgtgtgtggcttggtgtgagtgtttgccttcgtgcacctgtgtgtgacactttgtcagtgactgtgaggtcacgtgatgctagaactggccagaccagtggcaactggtgaaaatgtgtctgtgagcaagactatgactggctgtgggcgaatgatggatgggtgtgtttgtgggtctgtgtttctgcgcacagtggtataactggccgggtgtgcgtggctgtgtaaacaagtgctgttgtgtttgcatgcagctctgtgtctgacaacagtggatgacagtgtgtggctatggtttgctgtctggctgtgtggcgatggatgactgtgtgtctgtgtaagctgcaataatgtgtgttctctgcatctctgtggggccgtgtctacagcactgtttgaattggtgatgaagctgtgtgctcccatctactcagaacaaacccagagctcttaccacagccctacgtgacctggccagccccaactctttgacccaatttccccctgctcccccctcactgcttctgctgcagccacaatggcctctttgtgttccctgaacatgccgggcacacggccacctcggggcttttacaccggttgtttcttctggttaggacacttttcctccagacatacatgtgacttgctctctcatgaaagctctataagggcagggatttttgtccattttctttcattgttgactccccaaagcctagaccaatgcccggcacacagtaggtgctcaataagtatttgtggattgatctccaggtaaatcatgcaagaaaaaaaaaatgtgtggattgaacgtgtgtgtgcatgtatgcatgcattcctgtgaccttctcgtgtgttcacgggtgtgtgggtacagccgcttgctgggtgtgtctgcttggccagggatgtgtatgtggggttctgtctgggacaactggacagggagtggacaggaaggggtcagctctgggcagcccctccacctgcccaaggccaggtcccctctgtggctcagatcttcctgtggcttggggaagctgcaagtgagtggaaggaggcggtggcctggggccaggagtacctgaagactcacccagcagggaggagcccggccacacccatcgtgctggtcaagcagggccatgagcctcccaccttcattggatggttcttcacttgggacccctacaagtggactgtgagtgaggcctgaaacccccagccctaccctaatttgtggggagaggaacctgacctgggccaatggaatgaggaggcactgccctggctggggattgccagtgtgtgcgagagacctggtcttgtcctcaggcccctcatgtgtcccattggtgcccccttctcctgccctggccctgatacttgccccgattcttgctccagagccacccgtcccacaaggaagtggtggatggcagcccggcagcagcatcaaccatctctgagataacagcagtgagtcctggggcccctagccttccccacagtggcctgggctccgacagcatggtcctgatgggcaggggaagtgccaggcccttgtaagtgggaggggctgcagttggaggtaagaggcctgtgggttcagtgcagcctccctgtgggctactgattccccatcttccccagcctgaggctcctctctggacaggaagtcaacaacttgcggctatccagatggccgggcaatggcagggcaggtgccgtggccctgcaggccctcaagggctcccaggacagctcagagaatgatctggtgcgaagccccaagtcggctggcagcagaaccagcagctccgtcagcagcaccagcgccacgatcaacgggggcctgcgccgggaacaactgatgcaccaggctgttgaggacctgccagagggcgtggaccctgcccgcagggaggtgggcaccccctcactgccccagcactagtgcatctgacactgagctggaggagcccaaggcaggatccactggtggcgggcagtgggcaactgccccgggagatgtgtcttctagctggggtggtgggcaaacagatgcgggagtcccaagccctggatgactgacactactgagtggggcaggattctgggctcagatgacaccctaccctgtacctccccctctctcccctgcccagttctatctctcagactctgacttccaagatatctttgggaaatccaaggaggaattctacagcatggccacgtggaggcagcggcaggagaaaaagcagctgggcttcttctgaacccaagccctctcgactgcccctatcccctggaccccaacatacctacaatgctggggaggccctgcttccactcccctcagaggcttttggtcatcctctgcgtgtcagtaaaagcaggcagcccata

SEQ ID NO: 22 - DNA, 48337 bp, Homo sapiens
  DNA (1)..(48337): ZNF720
gcaggggcggcttccgggatttggcggtggcctttgttggctgcagtaagagctcagtctcttcaccaggggctcccagtccttccatctgggaggccaaggcggcttcgcgttctgagaatagacagaacctctgttactctgtgaccggcaggcaccgggagatccgtagctcagacgccaggacatcccggaagctgggaaatggtgaatgtgccaggtcgggggtccccagaagagggagaggggcggtcggaagcggcgggaaccctctttgaggttagcttcggggtctgggccctgagtccccgcggacgcaactcggcccttggtcccctccgccgcaagatggcggccgggccggcagccgggaccccgcgcgtccggtcccctcccgaccccgcagagcgacctctgccatggccggagccgtctttgggtcgccgcagcccggcgtctcccgagattgtgcggtgagaacgtgagggtcttaggggaaatcccgggtcggcgtgtgattcgtgtgtgggaagatactgtgccccgtggtgtcccagtctcctttttcctcttacaaattaaggggagtcacccttaaagcgttaaagggttgatttaggtaaacagcgattggtgaaatgggaagcctgccgccgtggtttgtggtttagggtcctctggagcagcgatttcaaaatcccagggctcagcttaggaatgctgctggggaaaagaaatagggacaatctctcttccactttggctgtagaaaacgaatacatttccacagaaagtgtgctagattaattggtcaattacaaacattcattaaaatatcaggtcctctcttttgcagtggaggatttgtgacagtggatatctgtgttccatattctactgctatctggatgtccgactttaatgccaaatgttatgagacaggacttggcacctcctagaagtgttcacatatactaaatgatctgctattatggaaataattaaatgacatgtttcttgctcgaaagaggtattttggccttacctgttgaagtataaagtgtaagtgccttacagtttccttcctttctataaaaactgttttgagtgattttgctattttcctgaaacctgttaggtcactgaacatctgactggctgggcacctgctcctgtcccttcagttgaggtaggattggcagcactccccagaaggcgtgcagtgccaggagagtggaggaaggtctgacgtttgctatcctggggtaggttttagagctcgctagatgcttgtggagagctgatgagatgggaagaaggcaccccacctcgatggacctgaaagagagagcctgcgaattgagaagcgggtgtgtggaataaccctgactaggcatagaagacctcagtcttatttgagcctgcaaaaggaggtcattgaaggcccagttagttcttcctggggagcgcccccttcaggtgtccctgaggttcacagcagccatggagggagccctttgttactgggagaagctgcagagttctggaaagcaggggattcacaggcggatgtggtcgaggttgggctggaagggagattgggaagctctttctgagggtggaattgttagtgtcctggggctgtttcttgacttggtcaaataaaacatctggatataggtaagaagtgccttaattgtaaaggagtattgcaagaggaggaaagcaccaactgtaagatatttgtggatctcacagttgaagcagaaaaggcctttctttcatagggaggagcaaacatgattcaaggtgggaggggaagggcacgactcctggactaaatcagatccctgatcagagaatgtttcaccctgaagtcagcctgttcttaggaggggcataaagaggggttgaatgttgactcaggctgtgggtgggacaaacctcaggcaccttggagaaggggagaaatttaagcaactttggttaacacatattttgttttgaccatcgaagataaaactctttatttaattgcttatgagggggaaaaaaaggaaataggagagtttgtggctttgtgatacctaaaacagggagcatcatctaagtcataacaggaagaagattctttgcagtaagctgctcttgaagaacaaaaaggaagggggatttctttcatcacagctgcttcccagggttaactacctactccatcttttccccactcctttctcttgccctacacatctcttccattaggctgagttgtatcttttataataaactggtcaatgcaattacagtctttgctgagttctgtgaatccttgtataaaattaatgaacttgagtagggtattatgggaggccctaacttacaggcagtagctcagaagtatagatggcccctggggaattgtgactggcatctgtagaggggcagtgttgtggcactgaactctgaacttgtggggtctgtgctgcctctgggtgctgtcagaattgagttgttggacaaccagttggtgttggagaattggctggtgttcagcaaactccacacagtgtcataaaaaagatagcacagggacctgggctggagagagactctgggtgtctccaggaagggaggctgtattcccctgcacacagactgtcaccctacacattgtcctgtgattccacgtctcctcccagggtgagaagcgactgaggacagaaagggaagaagttctgagaacagacccctgcccccactgtgctgccaccacataattcccacccactctgaacacacccactaggcactggcgtcgccatgcccctttcaggacaagacatgaccctcaggaattgtgcccatagcacctttgctcctagagtttcctgccaaaattcccatacaggtgcctagaggactcctggcttatccttgcccccagaccctgaaactgcagcagcaacccagtccctccatcaacctaggcttgtggaccacccagtcatagtctcatctgcctgcatggacacaggagtaagtcagagcatagccttgcctgggccagtatctgtagcacaaaccagtccttccaccagttctgcactgccccccatgtgagagttcttagtagcaccttcccttctgccttttaacttccccacaaaccctgacagggtctctcactgtgtcgcccaggctggagtgcagtggcatgatcatgcagtcttgacgtccctgggctcaggtgatcctcccacctcagcctccccaatcactgggactggaggcatgtgccccccacacctggctaatttttgcaatttttgtagagacagggagggtctcaatatgttgcccaggctcatcacgaactcctgggctcaagtgatccacctgcctctgcctcccaaagtgctgggattacaggcgtgagccaccatgcctggcccacaaacccctttttatgtgcatgcggtgtgtccaaggcaaatcctcaggtgcctgaatctagcgcctgctggaattcagatgtccattaattcaagattatggccctagatctcccagttgtgagaacaaatacaaattaaaaatatgagacttaactcttcttgaaaataagggaagacatatttctctccttctttttcttgaatcatttactttagagaatttttgtatgtaagtttttttctgccttttggaaatatgtctaaatcattgtaacagctaaacagatcttttgtcttttgtcagtcagtctttgtttttttttttttttttttttttgagtcttgctgtgttgcccaggctggagtgcagtggtgcgttcttggctcactgcaacctctgcctcttgggttcaagcgattctcctgcctagcctcccaagtagctgggattataggtgcctgccaccacacagggctagtttttgtatttttagtagagatggggtttcaccatgttgtccaggctggtctcaaactcctgacttcaggtgatctgcctgcctcggcctcccaaagtgctgggattacaggcgtgagccactgtgcctggctgtcagtttttgattcgggacattctttctctaggactgggaatcattgatttgaactataggtagcaaagaagatagagccgtatcttacagtttctttaggagagcaggcatctaccttcaggcccctggctccaagttgcaaatgtacctacctgtcttgaagacatgaagtttatttttcctttaactatatagccaaataaaaaccacagatggcctcccaattcccaggtgaatttaggatgaactcttatctgacaaatggtgctgtcaggtcttctattgaggactaattatggtgacttttcatgagtgagtgtttttccaatctcttagcagattgcctgtaatgtccttcacattctggtctcattgtgtcatagaacagttttctttcgtttctaccattgtgcatcatttttctcatgattctgtttttaattatatttcccaaacactgagaaatgtaaggtgcccaccaggcctcactctagaggggatgttccctctaagacttcctgtcacaacccacatttgtgcagcaaagtgcctattgccccgaaaatctgcaggcagaatggtctttctgcttgtttggaatctttaatcccttctagaagagtttggccagatttctacaaaaataagttcacagggcatcagttagccattccagctctgtctttccatgcccctggcatcttcagacctgaaaccgattcagagaccatgggggctggaaaccaaccaggcacacacatgcattgagtaggcctgagaatctcaacattcccctcatcctcttgcccaaatgcccatgaatgtgcagaaggtgcgtgccacttctctgcccctccagcacctaaatctgtagctccaaatgttgaacccaggtcctggggttctccaggatgtgtgagagcagaattcctgaggggctgtctcctctagttttcttcacagcaacacccaagaatgcagagccaggttgattccacctggagtctgcacataaaggctggtctccacctgggatccacaagacagggccagactttggactgaggatgtatagaaaatccaggggacattttctgcattatgagagattgacatagaccttgtaaagccctactttttgtgtggggtcttttaagttttccagatcttgtccagtgagctgctgcagttctgtgagggccttctggtctaagcagaacatggtggcagaatctgtaagtgtaaagcagcaccttagcagagggagggcagggccacaactgtccagagccgtgagtgaagctacacctacctgtgagctgtgttactggagtagggtaatcttgtcctttcttgtacccaagagttagctgatcaggtataggtaatactacacgtggatccagaatctgtggctccactggggcagttccactttgtatcctggccccacagagtcagcctgagtctctcctgcccaaatcactactggggcatcagtacaggatcaccaggaactccctcaccagcaccttggagtccttgggacatttggtgatgtcctgtgcagactgaggtcaggctgacaacagggtctaatttctttccatctcagaaggaaaggaatgcatcatccaggatttgttcctccactcacagaaggaatctctttatttggtatccaaatgggatttgctccagttttctaatacgtggacgaagaacaaagaggagttctggagactcatactgataggtaaaccaattgcttccatttcatatggccattagaaaaacatttgtagcagccatagtccctaccatctgggaactttcagtctagagcagatggataatggccaaattcagcatcatgtgatccggtgcaagcacggaggtatacagggaacttgggcttgatttgggacactgtccttatttgaccttgtgagttctgatgtcacaatctgaagggccacccatggacagaagagttgttattattatttctattgattttctcttgatttgctttttaatataattttcccagaaggccctacatgttttgattaaattgcttgttaatggatttacaaaatacttaaggatgaaacaaacagttaaaatcagaaaaactctgggagtcaagttcttgtggtcaaaaatcagaaaaactctgggagtcaagttcttgtggccaggcttaggaaagacaggacttaaatcagcaacatagagatgggaagcctagggcctgacccgtgtccctagccttgctctgccccaaccctgcccaaatgcaccctcttctgagcttggttcaggtctggccccaccttggagcctaccctcacagaactgtttgttggagatcagacttctgagtggttgctcttgctggttctccagagctagtgctcacaatttccccaaacccaaaagcagttaaatgggagcaaaggacaatatgggggcctgaatttttttcttcattgagaacagtgtttctagagacatcccacctggcaacctttttccattcctgcagacccagtagttgcttcacaagtagtaacaaagtcaatgtaaagactacagtgagaaatccttaagaactaaacttcacccttcttttccgtatctctcccatctgtctatagttagcttttatagtgacagggaaacagaagaagagagagaaaggctaggccattatctaaatcctgctgggaattatgggatactcaggacccacatcccaggggtttatatggcttaactcacaccatgtgatgttgccagcacagtgcatactgtgagcacacagtacaagctcagtaaacactgctttaatgcatgtatccatgctgttttccaaatgctgacttagatgttactgtcctctccagcctctgtagactttaaatggctggcaaaggatgtgatttttcaggacagtggttggtggtcctcgctgtgaatgaaaagtatttgcgttgtgattagagtattgggtgtaagggaccctgtgttttgtgcccgcttcctctagctgtgtgctactgattatgggtcttaagccaattcatggaacttttccaaacctgcagaatcacagtacttagcacgggccccagaataccaaatgatgtgtatgcatattgaagcttgagagggaatgcttagttaagtgattctcagctcaggcttctaagtagagtcacatggccagttttaagaaatatggccacctgtatgttcctccacatattctgtttattattatacccagactatgatttacttttttcccccactaatatacaacgattatgggtccatcagtgcgtgagcattgataccaattcgtctcattacagtcgatgctaacttcattcacctggttcaggtgctctctgccagattccttcactagttatttttctctttgttgttaatgtgtttctaggagggaggatttactgagtgatgcatgtaaaccatcatgtttaatccagagactgccatttctctttagtttccctttgcttgtgggttgctttggagagtgaaggctctcacatttgttgaccgtaaatactggtttttgaaactggaaattctgaaacaagcctcacttctgtaggtttccattttaatttgctaatttcacaagcatacactcctttattctctgtattttcagagaaagataacaacaattaacatataattaatatatctactgtcttaaaattctaaaatataacagcacttagaataaataaaaacttggggaaaagaactagactcagaaacacaagctcttattttagtttatgtcattgaatgtgttagtcttcatagtttgttaaaaaacagaaaaagccatcatccatatagttttaacacaatttaaaatatttcttaattaagaaatgttctgtcacttttcatgtatgtatagttaccatttctatgtacgtatgtgcgtgtgacataagcatcatttgatcagttttgtgttgctgccttcctgttttcatcttcttctcagttgtgacacctgctctgaacattcttttttacttatctctgcatattggcctgtatgtccctttaaaatgaattctaagttagatactggggtaaaataataaataaaaaaataaataaatataaataaataataaaataagctctactatatactagatatttggcaaaaaattttttttcaggcttgagacagagaggggaagggtcagcaaaatatttttattaaagaggaagaatagtattatttctcatatagatttttgtggtttttatcaatacatgaaaaactgctaggatgacatctagtaaatagtaagtgttcaaaaaggattctactattcttgctattatgttataacctgtaaatttcataaaactctcaattccacatcatccctgaattcttcgttcagtgttcaacctctctgctattcaaaagtgtggcctctggacctgaggcattggtgtcactggtaagcttgttaaaaatgcggaaacgcagccccagccccagccccagatctcctgaatcagaatctgcatttgaaccagttctgcagtttattgctgaacacaataaaatttcagaagtatgcctctaagtcaccatgacttttccacctgagaattatatacaactgattgtggatgatgtaaatatagactaaaaaatgtatactcctatgttgatgcgttagttttttgttttttgtttttttgtttttgttttttgagacggaatttcgctcttgttgctcaggctggagttcagtggtgcaatcttggctcactgcaacctccacttcctggttcaagtgattctcctgcctcaggttcctgagtagctgggattacaggcatgtgccaccacgcccagctaattttttgtatttttagtagagatggggtttcatcatgttggccaggctagtctcgaacttaggtgatccacccatctcggcatcccaaagtgctgagattacaggtatgagctaccgcgcccggcctcgatgccttagttttatactttatattccatataggcatagtatctacactggttttgtggattttgtatcattctctttccacagagttagagaatacatagaaaatattattgtgtttaaaagtatcttattgaatatttcaggtcactcatataaatcagtcagttttcttagctctcttatttcatcttggtttgtcaagtgatgaactctgcccatggccacatggtcaatgtgctatttatttttatttcagggactgttgacattcagggatgtggccatagaattctctcgggaggagtgggaacacctggactcagatcagaagcttttatatggggatgtgatgttagagaactacggaaacctggtctctctgggtgaggataacttgcctttggaatatctaatatctaataactaagggttttatttctttcctttgtagaatgtcacttgggagcttatgctttatatgaatgaattcagattcctgtttccaggaaaaaaaaattgtgggtttgttgtagaaaagacttcctaatgtttgatcttgacatttgccttctttcttgaggtgatgtagaagcttcactctagtttagtagtgattctagaaaattgagtgacataaactatcattgcccacactttaaaatctaattccttctccttatttttgatttagtcatacttggaagtgaagctcaggattcctgtgtttaaaatgcttcctgaatattctaaagaagctgacaggaaacagtatttggggaagtaattttctaggatcctctataatgttccctctttactgagtatcctactgagctggcaattaaagaactcccagcaagagtcatgtgactttttctaataaaacaggtctcgctgtctctaagccggacctgatcacctttttggagcaaaggaaagagccctggaatgtgaagagtgcagagacagtagccatccagccaggtaggtgggagtgaatgaagtagatgacatgggcgagaggtccagagattaagaaagaaccagaccttgaagtgtggattgggaagttctccagtggaaatgatttttgagacacctgggtttatttctttctcttgctgctgtcacagagggacatcttctgtctcatattcttaaattatctgattattctccttacccttctgtgatccaccatcaaattcacagtgacagccaaagtgctccccttggcctgtgagggcctgcgtgatctgactgttcttccattgatttgggggctctgggaaagtctgtgcatgtttctacctctatgtgaaaccacttctaaagttctggttttgcctcatgtcagaagtgtgtgaggcgagtgatggacagtaggatttttttcagaagtcccaggaattctgtggatagatgtcacatattttctggtatattaatttctaatcctatggtggtttcccagatgatcctacaaaaattgagactcagtaattcatcagagtgcaaaacatcttcctaaatataaaaaaaaatctgattctgtatttcacttcaacttttcatctttcctagcctaaactaagattagaaatataatctctgtatgcacaaattccacagatttaaaatcatttaatatattacttactatgtagaattcttaactaaatgaatgtctatgggaagcttacaacattgtccagtatatagtgaactttcaactcttaccttatatattcataacattttataattttgtctggttaactgtgaagcttaatgagaatgtgttctttatgttcgttttctttcttttccttttcttttttcttttccttccttctttcatgtggatttttttcccacacttgtaaattatatatatttaagaggtgcatcctgatcgtttgattttatatatgtatacattgtgtattgattaatacaaataaattaattaacatattaatcatctcacatagttgccaggttttttgtggagagaacattaaagatctactgtgggccgggcgcggtggctcacgcctgtaatcccagcactttgggaggccgatgcaggcggatcatgaggtcaggagattgagaccatcctggctaacacgatgaaaccccgtctctactaaaaaatacaaaaaaaaaattagccgggcgtggtggcgggtgcctgtagtcccagctactctggagtctgaggcaggagaatggtgtgaacctgggaggcggagcttgcagtgagccgagatcgcgccactgcactccagcctgggtgacagagagcaagactccgtctcaaaaaaaaaagaaaaaaaaaaaagatctactgtgttagcaaatctcaagtatatatgagtattgtaaactatattcataatgctttacattagatccccagaatttatcttttaaatgaaagtttgtactctttgaccagtatctccccagttttaccacctgtcagctgttgggacccgttctacactttacttctatgaactcacctttttttagattccacaaataactgatattatacagtatttgtatttctctatcttattcaattaccatagttccacctggttcattcatccatgttgtcagaaatggtagaactaccttcttcattatgctgaataatattccactatatattttgaataatcagctgtgaacataggggtgcagatatctctttaacatactgattttatttatttatttatttatttttgagatggagtctcactttgttgcccgggctggagtgcagtggcgccatcttggctcactacaacctccgcttcctgggttgaagctattctgccacctcagcctcccaagtagctgggattacatgcttgtgccaccccgcctggctaattttttcgtatttttagtagagacggggtttcgccatgttggccaggctggtctcgaattcctggcctcaagtgatccgcacacctcgtcctcccaaagtgctgagattacaggcgtgagccactgctcctgccagattgtatttcttttaggtatatacttagaagtggaattgaggttcatatggtacttctatttttaatattttgaggagcctctatgctttttcccataatggctggatcaatttacatttccaccaatggcatacaacgtttccttttctccacactgtcaccaacatttgtgatcgcttgtctctttgatagtagacattctaacggtatgaggtgatatctcatgatctgatatctcattgtgttatctctctgtaaatgtgaggtgatggctcattgaggtttggtgttcatttccctgatgattaattatattcagcaccttttcttaaacctgtttgctacttttatgtaatccctggaagactttctagtcaggtcctttgcatatttttaagtcagatttactggcaactgagttgtgtgagattcttacatcttttggatatgaaactcgtatcagatatattttctcccagtccttaggccagtccttaggttgccttttcatgttgttctttgtttcctttgctgtgcaggcaatttttagtttgatgtagtcccgcttgtttttgtttttgttttttgattttgttgattgtgcttttttggtgtgaaatctaaaaaattagtaccaaggctgatgttgaagagtttgttccctgtgtttcttctaaaagttatccagtttctggttttacatttaagtgttaattctttttgagttcatttttgtatatggtataaatgttcaatttcatccttttgctcataaatatccaccttttccagcatcatttattgaagagaccatccttttccctttgtgtatcttggtgcccttgtcaaagagtgctaactctatacacatggggttatttttggtttccttgttctgtcccattggtctatatgtctttttaggtcaatataatactcactattagtatagctttgtaatagtttggaatgaagaagtgtgatgccttcaccttcattcttatttcttatgattgtgttggctatttgtggtcatttgtggttttatagaaatttggaggccagatgcagtggctcacacctgtaatcccagcactttgggagaccgaagcaggtggatcacttgaggccaggagttcaagaccagcctggccaacatggcaaaaccccgtctctactaaaaatacaaaaattagccaggtgtggtggtgcatacctgtaatgtcagctgttgaggaggctgaggcaagagaattgcttgaacccaggagcggaggttgcagtgagccaagatcacgccactgcactccatcctgagcaacagcgagactctgcctcaaaaaatatatataaaataaaataaaataaattttagaatttatttctatttctctgaaaagtgacattggaattttaatagggattacactgtatctgtagatcactttgtgtagtgtggacattttatcagtattaatttttccagtccatgaacaagggatatctttccatttatttgtgtctttttcaattgtattcatcactgtcttacagattttactgagcagatctttcacctcctttgttaaatggaatcataagaattttatacttttgatgctattataaattggattgtttgcttaactttttttctcagatcattaattgttagtatatagaaatgcaactaatttttgtatggtaattttgtgacctcagctttactgaatgagtattagctctaactctttttgtatactctttagggttttctgtatataaaatcacctaatctgcaagcagagaaaattacaattcttcgttgctgatatgagtgccttttatttcttttttttacctaattgctcttgttgcagggcaggtgagcccccagattggggcttatcctgggaaggttcacggcttcactcaggaagaattcaagtgcaagatagtggtagaagaaaacagctttattgagctggcagtgttgcagctctatgactgctcctgtggagcgaggctaccctgtaggcagtgtgctgagaggagcagttctgcagtcatgtacttatatacccacttttcattacatgcaaactaaggggcagtgttttttcccttcaattttttggaagaatttgagaaggatggacattaattcatctttaaatgtgtgatacaattcacccatgaattcatttggtcatgggctttttctcattggatttttttataactgcttcaatctcctttcttattattggtctgttcagtgtttctgtttctttgtgatttaatcttggtgagtcattcatttctaagaatctgtttcttctaagttatccaatttgttgtcatataattgttcatagtagtctcttattattctttgtgtgttgtcagttgtaatgactcatccttctttcttttatgtatttatttatttatttatttgagacagggtctcactctgatgtccaaaccaaagtgcagtggcatgatcataactcactgcagcctcaacctcccaggctcatgttattctcccatctcccaagtagctgggactacaggggtgtaccaccatgctcagctaatttttgtattttttagagagaagggtttcattatgttgcccaggctggtctccaaatcctgggctcaagtgatttacctgccatggcctccaaaagcactgggattacaagcatgaggaagtgcacccagcccacttataattttttgagtcctctctctttttgatcctttgcttaatctggccaaaagtttctcaattttgttttctttgaaaaactcaattcagtttctttgatcttttctattgcctttctagtctttatttagtctctttttgttctaattcttactattttcataattatgctaacattgggattattttgttcatgttcaagtttcttgaggaattgagttagattgcttattcaacatctttttttttcttaatgtagaactttattattataaacttctgtactagaactgttttggttgcatcacagaagttttggtttcttgtgtttccaatttcatttgtctcaggatatgtttagatttttcttttgatttcttcttcatcctattgatttttcaggagtgtgttgtttaatatttacgtatttgtgaatttccagttttctttctgctattgattttcagttttatatcagtgcaatcagaaaaaaaaacttgatataattttaatctttatacatttgaaaagacttactgctttttacttttggtttaacatgtgatctgtcctggagaatatttcatgtattcttagaagactgtattctcatattgttggatgggatgttatatgtacatttagtctatagtgttatagtagtgcactgctttcttaattttgtgcctgaatgatctatccattttaagtagggtactaatgttctcttttgttgtatttctgtatatttctccttccagttctgttaatgtatgctttatatatttaagtattccagtgttgggtgcatatatctatttaattgctctatcctctagacaaattaacctctctattattatatagttaactcctttgtctcttgtgacagattttgtcagacagcctgttttgtctaatgtaagtatagctacccctgcctgcactcttttgtttatcatttgtatggaatatcctttccagttctttcactgttagcttatgtttgtccttaaatcaaaagtgagtctcttgtaagcaacctgtcactggatttttaaaaattcattcagccactgtctgttttaaatccattttgtgctgctatatcagaatattcacagggtattttataatgaaatgggtgatttataaggaatacaaattaatttagcctgtgattctggaggcagggaaggcagagagcatgacactggcatctggtgaagacctttttgctgcataataacatggccaaaggcacgagggggagagagctcccttttataacaaacgcacacttgtgataattaacccactgctgtgataaggacattaatacattcatgcaggcagagctctcatggcctaatcacttcttaaaagtcccacttcttaattctatcacagtggctattaaattttaacctaaattttggaagtgacattcagtctttatcaatgtctgtttattggataatttaatctctttatatgtaattattgataggtaactattataagtttgttttctattttatactttgtttcttttttcctcttatgctttggtcatgttaattttttgtcttgtttttgttgtttttatatactttgattactttctttttttcttgtatctactacagtttttttttctctagtggttataagacttacataaaacatcatataacagcctagtttaagatgataattatccaacttttatgcatagaaaaactctatgcttttcctccccttcacacattttatactatatatgtcacattttaaaactttttatattttgtattcattaacaaattatcatagctatacttttaaaaaatagttttgttttatagttcttatactagaattaaaagtgacttatgtaccaccattacaatattcgagtattctgaatttcactatttaccatttccagtgatgtttgtagttttaatgttttcatatttagttagcatttcatcacttcaacttgagtaattccctttagtcgtttagcatttctagacaggtctagtggtgatgaattcctttaattttttttttggtgggggggtcttgaaatgtcttcatctctcttttatttctaaaagatgctttgttgtgtatagcctacttagttgtcttttttgtttgtttgtttgtttaattttccttctttcagcacttttaatatatggtatcactcccatttggcctgtaaggtttctgctaaaaaatctactgataacattataaagtttcccttgtatgtgaagaatctcttatttcatgctgctttcatgattcttgctttgtctttgaattttgacagtttaattatgatatgccccaggggaatcttcattaggttcttcttgccatgggtattttgagctttatgaaacttcttgttcatatccttttccagatttggggagttttaagacattatatctttaatcttttttcttctttctttcttcttctgaaaatcctaaaatatgtatatttgttcactttatgatatactatacaggctatatgcttccttcatgctttcatatttttttctaattgattactttcaaatgacctgtctttaagtttgctgatttttttcttctttcatgattgagtctcttgttaaaactgttagattttttcagttctttcattgttcgctttagttccaagatttctatctggttccttttaatggtttctatttctctgttaaaactctcattttgttcaagtattgtattataaaactttttagttatctatctgtgttcttttgcatctcattgaaattctttaagatgattattttgaattctttgtcagccaactttcagatctccatttctttggagatgattactatggctttttaatttcctttggtggtggtagtttgcctgattctttataatctgtgtaggcttatgtttatgtccctgaatgtgaaggagcaaacctctcttccagtcattatagacagttttgggaaataaatactttcttctttcagatcctgagctgatgagattttgactaagattgcacctgagtgtgttggagccatgtcacatgactgctactgggtctgcagtgggttttatggttgacagacctactagcagggcatagatagtcatggatcccgtctcttctctgggaagacaactttcttcaggatcttgagcattggggctggttctaagataaggaattgtagttgtttctgcagaatgggggtgctgatagaatagatgtggacaggtgtggctcctgcggagtctctgggagtggtttcatccagtcattgaacaagtcactgatggacatgactgacccctggtcacagctgagagggtctggaactgattcataggggtgctgcaggatatgggccctgggcccatggcttgtctccttccaggtttctcattgagcagaactgctcccagaccctggctgacagaaagtagagccaaacttacagggctactttaagattcacagtgagactaatgtcagcaagtctagctccaggggcacagatgtgtgtgctttcaggcaggtcccaggttgagcaaaactcctgacctgtggctgcatgaaactgaagcaaagtttcagtgccacttcaggattcccatttgggtcagtgttgacagttctacatccaggggcacagatggatattttttcctgagggtctctgtgtggacaggattttttccagaccatgactgagagttgacagagatagattttgccttattcagggagcacagacaagaccaggatcttcaggcctgtcacctgaatctcaagtgggaatgaatcctcctggattcttggaagattttttgagtggcaggaccaagaccaagtgagccatagctaaatctacagtcagatatagcaatttttttgttttgtgtccagaaccatgatcaataagcctacccttcggttaaggacttgtcctcaaattgtcctccttgatcttgggctccagctgggtgtcagaaattgtgacctggattgcaaagctcccataaaggcagttgtgtttggcatggctgccacattatgttgtgagaaatatgcatgggggcctcctattctgtcatcttgcttatgtttctaatcttgtatgtttccctttctgaaatatatatcaaatttgtctgatttttagattcaaaagttctgaaataaaatgctgaaatgtacgcattgtataagatgtaaattagattactagtgggtaccacatatttattaatatgtttgattataagtttaagtttactgcaagcaaaaaagaattgttaagatttatatatttttttagcctgtatttaaatgatgtataatgtaatcccaaatactgactttacatttcagtaattctcaccatattttgcaacatttatgttgttcctgtatttggaaatagaaagcttttatttttagcttctaaagactttattatagccattatattttatgtaagaatagcaccaatatattgataacatgataaagaagtcttcctagtgtcttttgaatatttactcattaaaattttctcattagagctaattattaatgattgtaatgcatttcctgtgacattttactgccattcattgaatggcattgattcaaaatgcctgttcttcatgggtgtacacagttgatagttgtaaatatctaaagcattattttttaatagaatatctatgatgtatttattattttatgcactaaaatttctcttattcttgttattgattccatatgattgtgtttcttttttttcagataggtttccttagatcagttaattgtatttttgcttttcaaccttgatattatgaattggatgataattttcaactctgtacactttaagacaatatgatgtttagatatgaattagctatatgcctgttgcttataaaatactacgtgttattcatctgtataaatattgcctctactttgttcatgacttatcttgtatatttttttttcttagctgttaatgattgctttattctgtctagatgagtagttaaggaaataatcttaaattcacaatctattgtttggatctatataattatgtgagaggaacacttttgttctttgaaggtgatttttgaaacattttataactatctcttttaggtagtcacatttttaatggtgaaaacataattgtcatctcaaacatttttaagtgtacagtttattagtgttaagtatagtcatattgttttacaagaggtttgtagatcatttttattttacagaagtcaaagtgaatacccattaaacaacaaattgtcctttccacacttctctccagctcctgaagagcaccattctgcctaatgtttctatgagtttggctactgtagatactttatgtaagtgtaattaaacagtgtctctttctttttgactatcttatttcacctgacataatgtcctcaaggtttgtccttattaatacttgtcaaaatgtctctgatttttaaggctcagtaatgttctgttgtgtatgtgtgccacatttgtttaatctgctcatccataaaggaacattttgattgcttccaggtattgtcttttgggagtaatgctgcagggtacatgggtgtgcaaacatctattccgcgttctgttttgaatatgcttggaatattttggatacacggatgtagtaccatgtgtatgttcttgctttttgttgcctcatcctttgatattatatccaaaaaatcattgccaagaccaattttcatgaccaagctttccacttctgtatttttctaggagttttatatttataggttttatgtttaagttttagtttgctttttaaattgatacaatgttaattgtacatatttacggagtacaattatatatatgtgtgtgtgttgtataatgatcatatcaggatgtttagtgcattacctcatgtatttggtaattcttagtggtgagaacattcaaaagtctctcttctaacttttttttttttttttagcttttattgtttgtagagacaggatctcactgtgttacccaggctgaagtgcagtggcacaattgtagttcaccatagcttcaaactcttgggctcaagtgatcctcctgcctcagctccccaagtcgttaggactacaggcatatgccaccgtgcctggctaattttaaaaaatttttgcagagatagggtctcactacattgtccaggctggccttgaactcctgaccttaagtggtgctcctgcttccgcctcccaaagtacagggattataggcatgttacactgtgactggccttttatagctattttgtaatatgcaatacccttctattaaccattgttactgtactgtgtaatagaacaccagaacttacttctcctgtgtaattgtaactttatacctgttaaccaacctctttctattcctcccccttcagtctctggtaaccactgttatactctgcttatatcagcttttttttccttttctttttcttttttttttttaagacagagtcttgctctgttgcccaggctggagtgcagtggcgtgatctcagctcactgcaacctctgcctcctgggttcaaggtattctcctgcctcagcctcctgagtagctgtgattacaggcatgcaccaccatgcccagctaatttttttgtatttttagtagagacggggtttcaacatattggccagactggtcttgaactcttgaactaaaatgatccacccctcttggcctcgcaaagtgctgggattagaggtgtgagccactgtgccctgcccgcctgcctgccctttcttttctcttttcttttctcttttcttttctttctctctctttctttctttttttctttctttcttttcaggttactcatttgagtaagatcatgaagggtttatctttctgtatatggcttattcacttaacatgatatctcatggttcatccatgttattgcaaaggacaggattttattcttttttaatggctgaatagtaattcattgtgcatttacaccacattttctttatccatttatctcttggtgtacatttggattgatttcatatcttggctgttataaagagtgctgcagtaaacatgggaatgcagctatgtttttgacacgttgatttcctttcttttggatatatacccaatagtggaattgctgaatcatatgacagctgtatttttaatttttcaggaacctccatactcttttatagtggccatactactttacaatcccatcaacagtatatatgtgttcctttttcttcacatcctcaccaatacttgttttagttatattttttgtctttttgattatagtcattttaactggagtgtggtggtatctcattgtggtttgtatttgcattcccttgatgattagtgaagttgagcatctgtttatgcaccttttggccatttgtatgtcttcttttcactaatgtctatgaaggtctgtggcacatttttaaattggattgtatgtttgttttattttgagatttcaaatttcttatatactcaatattaacctcttgtcatatgtatagtttgcaaatgttttctcccattgtctaggttgtctcttcactctgttatttcatttcatatgcaaaagtcttttaggttgatgtaatctcatttgcctatttttgcttaggttgcctttgctttgaagtcggaatttccaagtccgatgttgtaaagtatttgccctgttttcatctaatagtttcatagtttagggcattacatttaagtctataatccattttgagttggtttttgtatatgatgagggttaggggtctagtcttattcttctgtatatggatattcaatttttcctgcaccgtttattaaagagattgtcttttccccaaagtgtgttcttggcatctttgttgaaaatcagtcagctttaggagcatgaatttatttatggactcattgggcatattggtctatgtgtttgctttaatgccagtataatgctgtttgggatactgtagctttgtagtaaattttgaagtcaggtagtgtgatgccttgagcctgctttgttccttttgctcaggattgctttggctattcagggtattttgtggttccatgtacatttagttttttttttttttttctatttttgtgaagaatgtcattggtattctgatagaaattgcgttaaatctataggtcactttgggtaacatgcccattttaataatattctttttttttttttttttaagatggagtcttgctcttgtcacccaggttggagtgcaatggcgcgattttggcttactgcaacctccgcttcctggattcaaatgattgtcctgcctcagcctcccaagtagctgggattacaggcacccaccaccacgcccagctaatttttatatttttttgatagagacagggtttcaccatgttgaccaggctggtcttgaacacctgacctcaggtgatccacccgtctcagcttcccaaagtgctgggattacaggcgtgagccactgcgcctggcccattttaataatattcttccaatatataaacacaatatattttcatctattcacatgtatttcattttttcatccatgttttatgattttcagtgtagagatctttcacttttttatttaagtttattgctgggtatgttaattttttatagttatttgtatacacagaaaaagtatttgacaaaatttaactttctttatagtgaaaactctaagcaaattatgtatagaaggtatgtatctcaacacagtaaatatgacaaaccagtgttaatatatcaaacagggaaaagatgaaagctttttctctgagatctgtaacatgataaggataccaattttcaccactcctattcaacatagtactagaagttctagccagagcaattagtcaagagaaagaaataaaaggcatccaaattggaatggaaaaatgaaatcgtccttgtttacagacaatatgaccttgtttataataaaaacataaacatgacacaaaaaacctgttagaactaatgaacaagttctgtaaagtcgcaggatacaaaatcaacatagaaatttcagtggcatctctgtgtgctgatagaaaaccatctgaaaaagaaaataaaaaatgtgagttacagtagctacaaaaaataagtcagtccattttgagttcatgtttgtaaatgtgcaaggtaaggtccaactttattttttcccttgtggatttccaatatgcccaatcctatttgttgaagagactgtcccttttctcattgtgaattcttggaacccttgttgaatataagtttactatatacatgagtgtttatttctggactctccaatctgtttcatcttttatttatctttatgtcagtagcagactgttttgagtacaatagctatgtagtatattttgaaatcagaaagtatgatgcctctttgtttttctttcccaagattgtttatccatctgtggaagattatttatccatctgtggtctcttgagattccgtagacattttagactatgttaatacttgtgcaaaaagttccattaatattttgatggagagtacattgaatctgtagatcactttaggtagtattgacatcttaacagtattgtcttcaaaatcttgaacaaaagtgtgtttgagagtttatttaatttccacatattcatggacatgccatttttctttctgtttttaatttctagttttattctgttgtagtaagaagtgatgctttgtgtgattgtcatctgcttaaatttggtaaaagtttttttgcagcttaacaggttgtctattggtgatcatgtgccatatatggttatggatattgtgtattctgctgttgaatggttagttctgtatatgactattaggtctaatggtctatagtgttgttcaggtcctctgtttccttattgatcttttgtctcttattctttccattactgaaagtggagtatggaagtctcctactactattgtactgctggctacttattgcttcaattctgtaaaagtttgctagttgctgcatatatttgagaggtgtgatgttaggtgcatatatgttaatatttattatagcttcctagacagtgaacccgtttataattatataatgctctttcttgtctcttgtaacatgttttgatgtaacatgtattttaactaatatgacagtattttactttgcacactattttttttccattctttcatgttcagctcatatgtgttcttagatctaaagttggttttccctagaaagcatggagttagatcttgtttcttgaatttattcagccaaattatgtcttttgaatttattcatttatgtataaagtaattactgaaaggtatgactcaccattgcattttgttcaattttttgttttgggttttgtatctattttggtcccgttttcttctcttgctatcttccttagtgttctgttgatttttgtaatgacatgttttaattcctttcccacttctctctgtgtatctattataggtacttgctttgtggttaccatagatattatgtaaaacatcttaaagttacaacaatttacctcaagctgctaaccttaattgcatacaaaaatcctgcctctttatgaactctccattgtattttattgatatcacaaattatatcactttatactgtgaatccattagcacagatttgtggttattttaaagtatttgacttttcaaatctatagcagaattaaaagtattctatgcaccatcattataatacagaatattttacttgtgtatataattactgttaccagaacactttatatttttatataattttgtgttactactcaccatcattttatttttcaatgtgaagaactgcctctatttagcagttcttttagaacagatctagtggatatgaattcattcagcttttgtggattttgaatattccttatttcaaaattgttaaaggatagttttggcagaaaacattttcttgattggtagttgtcattattcagcactttgaatatatcattcttcaactttctgacctgtgagattttttgctgagacatctgctggtcatcctaggaatgggccttgcatatgccaagtcacatttttttttttctggcttctaaattctctttgttcgtaacttttgaatctctgattataatgtgtcttgttgtggatctctttatgttgctactaattagagttggtagagtttcattaaattttaggccattttctccctcaaatttggaaaattctcagccatcatttcttaaaataaagtttctactctttcctctgtctttgcattttagaattcccattatgagtaaattggcctattgggaacaggcccccaaatctggccataaactggtcccaaaactgaccataaacaaaatctcggcagcactgtgacatgttcgtgatggccataacgcccatgctgaaggttgtgggtttaccggaatgagggcaaggaacacctggcccacccagggtggaaagccgcttaaaggcattcttaaaccacaaacagtagcatgagccatctgtgccttcaggacatgctcctgctacagataactagccagagcccatccctttattttggcccatccctttattttggcccatccctttgtttcctgtaaggaatacttttagttagtctataatctatagaaacaatgcttatcactggcttgctgtcaataaatatgtgggtaaatctctgttcgggggctcttagctctgaaggctgtgagacccctgatttcccactccacatgctatatttctgtgtgtgtgtctttaattcctctagcgctgctgggttaggtctccacgaccgagctggtctcagcattggcctacttgatagtaccccattagtcccttagacactctgtttttttatttttgctgtcctgaccatatactttcaaataacctgttatcaagcttgttgggttatttttctgctagatcaagtctgctgttgaaccctctagtgaatccttaaatttagttatttttcagctccatactttgtgtttttatagttttaatctctgttcataacctcattttcttcatgcatttttgtcttcttttgttaatttgtctgtgttctcctttaactggttaagcatctttaaaatagatattttgctaggcagagtggtgtgtgcatgtaatcccagctactttggaggctaaggcaggaggatcacttgaggccagcctgggcagtattgcaagaccctgcgtctaagattttttttttttttaattagttgttgtggcatgtgcctgtagtcccagtgactcaggaggctgtgtcaggaggattgctttaccccaggaatttgaggctaggctacattgagctatgattgtaccagtgtactccagtctgagtgacagagtaagaccccatttttttctgtttcttttttctcttaatatacttttgacttttattttagattcaaggtgtacatgtgttggttcattacatgggtatattgcattacactggtttgatgtctgaatgatcccatcatccagataatgagcatagtgcctaatagatagtttttcagcccttgcttccttcctttactgcccccatgagtccccattgtctcttttccccatctttatgtccatatgtacctaatgtttagttcccacttataagaacatggtctttggttttctgttcctgtgtgttaatttacttaggataacagctgcatccatgttgttgcaaaggacatgattttattttttttatggctgcatagtattccacggtgtatatgtaccacattttctttagccagtccaccattgatgggcatctaggctgattccatgtttttgctattgtgaatagtgctgtgatgaacatatgagtgcatgtgactttttggtagaacaattcattttccattgggtatatactgagtaatagaattgttgggtcaaatggtagttctgagttctttcagaaatctccaaactgtttttcacagtgactgagctaatttaattacattcccatcatcagtgtataagtattatctttactgctggcacttgccagcatctgttttttgacttttcagtaatcactattctgagtggtgtaaatagtatctcagtgtggttttgatttgcatttttctgatgggtagtgatgtgtaacattttttcgtatgcttgatggctgcttgtatgtcttcttttgagaagtgtctgctcttgccctttgcccactttttaatggggttattttttttcttgttaatttaaatttcatatggattctggaattaggcctttgtcaggtagatagtttgtgaatatcttctcctgttctgtaggttattgattcttttcacagtttcttttgctgtgcagaaactctttaattaggtcccatttgtcaatttttgtttttgttacaattgcttttgagaatttagccacaaattctttgccaaagtcaatgtctagaatggtatttgccagattttcttctagtatttttattaagtttctgaatttaaatctttaatcatcttgagttaatttttatatatggtgaaatgtaggcgtctatgttcattcgtttgcatgtggttagtcagtcatcctagaaccatttattaaatagggagtcctttcactattgcttatttttgttgactttgtggaacatcagatgattgtaagtgtgtgcctctatttatttctgggtgctctattctgttccatcggtctgtgtgtccttttttaaaaaaaattttttgtttttctttatttcctcaaaaaaaaaaaagatgggggatacatttgcagaacatgcaggtttgttacataggtatatgtgtgccatggtggtttgctgcacctgttgacccattgtctatgttccttcccctcacccacccagcccccaccaggccctggtgtgtgttgttctcctctctgtgtccatgtgttctcattgttcaactcccacttataagcgagaacatgcagtgttttggttttctgtccctgtgttagtttgctgaggatgatgacttccagcttcattcacgtccctgcaaaggacatgatctcattcctttttatggcttcatagtattccatggtgtttatgtaccacagtttctttatccagtctatcattgatgggtatttgggttggttccctgtctttgctattgtaaataattctgcagcaaacatacgtgtgcatgtgtcgttatagtagaatgatttatattcctttgggtatatacccagtaatgggattgctgggtcaaatagtgtttctgattctcgatccttgaggaatcaccacactgtcttccacagtggctgaactaatttacattcccactaacattgtaaaaacgtttccatttctccacagcctggccagcatctgttgtttcttgactttttaatgattgccattctgactggcatgagatggtgtctcattatggttttgatttgcatttatctgatgatcagtcatgttgagatgtttttcttatgtttgttggttgcataaatgtcttcttttaagaagtgtctgctcatatcctttgcccactttttgatgaggttgtttttttcttgtaaatttgtttaagtttcttataaattctggatattagacctttgtcagatgggtggtttgtaaacatttttcccattctgtaggtaaccaggcttttagtttaattagatcccatttgtcaattttggttttcgttgcaattgcttttggtgttttagtcgtgaagtctttgcccatgtctatgtcctcaatagtattgccaagattttcttctagggtttttatggttttgggttttacatttaagtctttagtccatcttgagttagtttttgtataaggtgcaagaaaagggtctagtttctgttttctgcatatggctagtcagttttcccagcaccatttattaaatagggaatcctttccccattgcttgtttttgtcaggtttgttgaaaatcagatggttgtagatgtatggtgttatttctgaggtctctattctgttccattggtctatatatctgttttggtaccagtaccgtgctgttttggttactgtggccttttagtgtaatttgaagtcaggtagcgtgatgcctccagctttgttctttttgcttaggactgtcttggctatatggggtcttctttgattccatatgaaataaaagtagtgtttttctaattctgtgaagaatgtcaatggtagtttgatgggaatagtatttaatctataaattactttgggcagtatgaccattttcacaatgttgattcttcctatccatgaggatggaatatttttccatttgcttgtgtcctctcttattttcttgagcagtggtttgaagttcttcttgaagagttccttcacatcccttattagctgtattcctaggtattttattctgtttgtagcaattgtgaatgggagtttattcatgatttaactctctgcttgtctattcttgttgtaaaggaatgcttgtgatttttgcacattgattttgtatcctgagacttttctgaagttgcttatcagtttaaggagttttttttggctgagatgactggttttctaaatataaaattatgtcatctgcaaacagagacaaattgacttcctctcttcctatttgaataccctttatttctttctcttgcctgattgccctggccagaactttcaatactgtgttgaataggagtggtgagaaatggcattcttgtcttgtactaattttcaaagggaatacttccagcttttgctcattcaatatgatattggctatgagtttgtcataaatagctcttattattttcagatatgttccatcaatacctagtttattgagagtttttaacatgaaggaatgataaattttatcaaaggccttttctgtatctattgagataatcatgtggtttttgtctttggttctgtttatatgacggattacgtttattgatttgcatatattgaaccaacctcacatcccagggatgaatccaacttgatcgtggtggataagttttttgatgtgctgctggattcagtttgctagtattttattgagggttttcacatcaatgttcattggggtattagcctgaagttttctttttttgttgtctctcttcccagttttggtaccaggatgatgctggcttcataaactgagttattgaggagtccctccttttcaattgtttggaatagtttcagaaggaatgttaccagctcctcattgtacttctggtagaattcggctgtgaatccatctggtcctgggcattttttggttggtaggctattattgcctcaatttcagaacttgttattagtctattcagggattcgacttcttcctggtttagtattgggagggtagggtgtatgtgtccaggaatttatccatttcttctggattttctagtttacttgtgtagagatatttatggtattctctggtggtagtttgtgtttctgtgaggtcagtggtggtatcccctttatcactttttattgtgtctatttgattcttttctcttctttattagtctagctagtggtcaatctattttgttagctttttcaaaaaactagctccttggttcatttattttttggagggtttttcatgtctctatctccttcaagtctgctctgatcttggttatttcttgtcttctgctaactcttggattagtttgctcttgcctctctagctcttttaattgtaatgttagggtgttgatttgagatttttctagctttctgttgtgggcatttagtgctataaatttccctcttaacactgctttacctgcatcccagagattctggtatgttgtctctttgttctcattggtgtcaaagaacttcttgatttctgccttaatttcattattttcccaggaatcatgcaggagcaggttcttcaatttccatgtaattgtatggttttgagtgagtttcttaatggtgatttctaatttggttgctgtgtggtctgtgagactgtttgttatgatttcagttattttgtatttgctgaagagtgttatacttccaattatgtggttgattttagaataagtgccatctggcaccgagaagaatgtatattctgttgatttggaatggagagttctgtagatgtctattaggtccacttgatccagggctgagtttaagtcttgaatatccttgttaattttctgtcttgttgatctgtctaatattgacagtggagtgttaaagtcttccactgttattgtatgggagtctacgtctctgtaagtctctaagaacttgttttatgaatatgggtgttcctgtattgggtgcatatatatttagaatagttagctcttcttgttgagttgttccctttaccattatgtaatactcttctttgcttgttttgatatttgttggtttaaagtctattttgtcagaaactaggattgcaacccctgcttttttttttctttccatttgcttggtaaattttcctttatccctttatttagagcctatatgtgtctttgcacatgagatgggtgtcctgacagcaaaccaattggtcttgactctttatccaatttgcaagtctgtgtcttttaattgagacatttagcccatttatatttaaggttagtatcgttatgtgtgaatttgatcccgtcatcatgatgctatttggctgttttgtgcactagttgatgtggtttcttcacagtgtcattagtctttatgtttttgtgtttttccagtggctggtaccagtttttcctttccatttttagtacttctttcagtagctcttgcaaggcaggcatggtggtaatgaaatccctcagcatttgcttgtctggaaaagattttatttctccttcgcttttgtagcttagtttggctggatatgaaattctgggttgaaaattcttttctttaagaatgttgaatattggcccccagtctcttctgacttacagaatttctgctgagaggcctactgttagtctgatagatttccctttttaggtgacctggcctttctttctggctgcccttaacattgtttccttcatttcgaccttggagaatctgatgagtatgtgtcttggggttaatgttctcatggagtatcttagtagtggtctctgtatttcctgaatttgcatagtggcctgacttctaggttagggaagttcacctggataatatcctgaattatgttttccagcttgtttccattctcctcatgtttttcaggtactccaatcaatcgtaggttcagtctttttgtgaagtcacgtatttcttggaggctttgttcattcctttttattatttttttctctagtcttgtctgcatgccttatttcagccaggtggtcttcaaatgctgatgtcctttcttctgcctggttcgtttggccattgatacttgtgtgtgcttcatgaagttctcatgctgtgtttctcagctccatcaggtcatttatgtttctgtttttttttttaattattattatactttaagttttagggtacatgtgcacaatgtgcaggtttgttacacatgtatacatgtgccatgctggtgtgctgcacccattaactcgtcatttagcattaggtatatctcttaatgctatccctaccccctccccccaccccacaacaggccccagtgtgtgatgttccccttcctgtgtccatgtgttctcattgttcaattcccacctatgagtgagaacatgtggtgtttggttttttgtccttgcgatagtttgctgagatgatggtttccagcttcatccatgtccctacaaaggacatgaactcatccttttttatggctgcatagtattccatggtgtatatgtgccacattttcttaatccagtctatcattgttggacatttgggttggtttcaagtctttgctattgtgaatgctgccgcaataaacatacatgtgcatgtgtctttatagaagcatgatttataattctttgggtatatacccagtaatgggatggctggatcaaatggtatttctagttctagatccctgaggaatcgccacaccgacttccacaatggttgaactagtttacagtcccaccaacagtgtaaaagtgttcctatttctccacatcctctccagcacctgttgtttcctgactttttaatgatcgccattgtaactggtgtgagatggtatctcattgtggttttgatttgcatttctctgatggccagtgatgatgcgcatttcttcgtgtggcttttggctgcataaatgtcttcttttgagaagtgtctgttcatgtcctttgcccactttttgatggggttgtttgtttttttcttgtaaacttgtttgagttcattgtagattctggatattagccctttgtcagatgagtagattgcaaaaattttctcccattctggatgttgcctcttccctccgatggtagtttcttctgctgtgcagaagctctttagtttaattagatcccatttgtcaattttgtcttttgttgccattgcttttggtgttttagacatgaagtcctcgcccatgcctatgtcctgaatggtaatgcctaggttttcttctagggtttttatggttttaggtctaacatgtaagtctttaatccatcttgaattaatttttgtataaggtgtaaggaagggatccagtttcagctttctacatatggctagccagctttcccagcaccatttattaaatagggaatcctttccccatttctagtttttgtcaggtttgtcaaagatcagatagttgtagatatgcggcattatttctgagggctctgttctgttccattggtctatatctctgtttggtaccagaaccatgctgttttggttaccgtagccttgtagtatagtttgaagtcaggtagcgtgatgcctccagctttgttcttttggcttatgttcctctctaaactgtttattctagttagcagctcctctaaccttttatgaaggtttttagcttttttgcattgagttagaacatgttcctttagctcagtgtagttttttattacccatcttgtgaggcctacttctgtcaattcttccgtctcatcttctgtccagttctatgcccttgatggagagatcttgcaatcatttggagaagaggcactctggcttttgggttttcagctttttttagttgattctttctcatctctgtgagtttgtctagttttgatctttaaggctgctgacccttggatggggtttttgtgggagtttttgttgttgttgatgctgttgttgttgctttctgtttgtttttcttgcaatggtcaggtcccactctgaactccggggggcaccaacctgatgccagtaggattgcccttgtatagggtgtctgacaacccctgttgagggtctcaccctgttgggtggcacatggaataggacccatttaatgaagcactttgtcccttggtggaggtagtgtgctttgctggggaaaaacccacttgtctgggctgcctggattcctcagaactaccaggaggaaaggctaagtctgttggtccacagagactgttgtcacccctctcgctaggggctcaggcccagtgagatctgggttctttccctgaacctctggctggagttaatggagttcctgcagggaagctgtgcacagtgagaaaggatggcctgggtcaggcctgaagaggcactctggctgcagtctgccacagccagtgtgttgggttgtcagggacacatcttgggaccaagccatgcagcctccctgactccagaaggggaaaagcacagcctggagctatagaggtggatgttgcccttccctcaccctgggagcttagcatgttatgcagttgtgagccccagtgctggctactgcccctctgccaaggagctcaaatggcttagacagcaggcagatgcagctgtggtgcttgtcgcccctccctgcaggtgctctgtaggcttaagcagattccagctgagaggctgttgagaatctgtgcagccacagggttgggatgctaagactcagtggcatgagttcacgaatgggatcttccgatccgtgggttgcacagttccctggaagaagcatggttttcctggctgagtagcacactcacacactgactcctctggctggcaggacagggctctcctcccctgtgtggctctcaaagccacaccacactgttattactttctctgtggatcatgccagcctcctagtcagttctgatgggagaatctggataccttggttgctggtgaaagattcacacacttattattgttcttttcgatgggagcctccgaacgctactgtttctagtcagctgtattggccccgcccctgtgtgtatttttatgccagtaccatgctgttttggtgactgtaggcttatagtatagtttgaagttggataatgtgaagcctttggttttgttcttttgtttaggattgctttggctatttggactcttacttagttccatatgaattttagaatagtttttttctaattctgtgaaaaatgacgttggtagtttgataggaatagtgtggaatctctggattgctttgggcagtatggccattttaatgatgttgattctttgagcatggaatgtttttccagttgtttgtgttgtctatcatttttttcaacagtgttttatagttcctcttgtagagatctttaacctcattggttagatctattcctaggtattcggttttttctttgtgtgtgtggctattgtaaatggaattatgttcttgatttggcactcagcttgcatgttattggtgtatagaaatgctactgagttttgtactttgattttgtatcttaaaactttactggagttccttatcagtttcaggagccttttggcacagtctttccaggtgtagaatcatatgagcagagatgatgttactttcttcttttcctctttggatgccttttatttcattctcttgactgatctttctggctagtacttccattactatgttgaatagaagtggtgagagagggtgttcttctctcattcttgtttttaaggggaatgcctccagcttttgctttgtcagtgtgttggctgtgggtttctcatagatggctctcatttagaggtatgtttcttcaatgcttagtttgttgaggggttttttttttatcattaagggatattaagttttatcaaaagcttatctcatatatattgaaatggtgattttttttggagctggagtcccactctatcccccaggctggagtgctcactgcaacctccgcctcctgggttcaaattattctcatgcctcagtcgccagagtacctgtgactacaggaatgtgccatcacacccagctaatttttgtatttttagtagagacagggtttcgccatgttggccaagctggtctcgaactcctggcctcaggtgatccaccggcctcggccttccagagtgctgggattacaggtgtgagccactgcgcctagcttttaaattttgattctatatggtgaatcacatttttaaatttctatatgttagactaaccttgcattctaggaataaagcctagctaattgtggtaaattaactttgagtatgctgctggatttggcttgctactattttgttgaagatttttgtgtctatgttcattagagatattgtcctgtagttttatttgttcattgtgtctttgccagattttggtaacagagtgatgttggcctcatagaatgaaaggggaggagtcccttcttatattttggaatagtttagtagaactgataccagctcttccttgtacttctgatataattcagctgtgaatccatcttgtccagggcttttttggttggtaaattttttattactgattcagtatcagaacttgatactggtttgttcagggtttcagtttcttccctattcaatctttggaaattttgtgtttctaggaatttatccatttcctctagatgttctaatttatgtgcatagaagtctctgagaatcttttgtatacctgtgggatcgattgcaatgtcccctttgttgtttctgattgtgcttatctggatcttctgtttttctttgttaacctagctagtggtctatcaatctcgtttaccctttcaaagaaccaacttttggttttgctgatgctttgtatggaatttggggtctcaattaattcagttatctgattttagttatttctattcttctacatttgtgctcagcttatttttctttttctagtttctttacaagtgatgttatatcattaatttgagatctgacttcttgaaataggcatttcgtgttataagcttcttttaatgtggctttagctgtgtcccaaagattttggtatgtgttttctctgttttcacttatttcaaagaacttttaaatttctgccttgatatcattgtttactcaaaagttgttgaggagccagttgtttaatttctatgcatttctgtggttttgagagatcttcttggtattgttttctgtttttattctattttagtccaaaagtatgactggtatgatttttttctttttaatttattgagacttgctttctggctgagtgtatagggtcaatcttcaagtatgtcctgtgtgcatatgaaggatgtatgtgttctgtggttgatgggtggaatattctgtagatgtctattaggtccagttggtctattctgtagatgcctattaggttatgtggaattgatgtctaaaatttctttgtgaattttctgcctcagggatctaatgatgtccatgggatgttgaaatacctcactgttattatgtgactaattcttttctcaggactagaagcacttgttttatgaatctcggtgctccgaagtttggtgcataggtgtttagcatgtgtaggtattcttgttgaattgaaccctttatcattatggaatacatccttgtgcttttgtatggttgttgggttaatattctcatttcttaaagaagtcacaaaatgccaggttcagttgctggtttcatcccagcactttgagaatctgaggctatagtattccttgaggccaggaatttttgaccagcctaaatgacctagcaagaccctggttgtacaaagaacttaaaaaattattcagatgtgatggtgtgtttttgtagtcatagccacttggggaagtgaggtagggtgactgctttaggccaggaattcgaggttccagtgagctatgattgtactctggcctggtgacagtgcaagaccttgtctataagacaaagatagatattttaaattattttaaaattagttaatagatttctacttctctagcttcacttggatattaatatgttagttaatagatttctgcttctttagattcactttcattttggtccctttattgagccatgtgttttggttactttgatgtcttgtgattttgttgatattttgatcaagtaagagacagctacctattccatctattatggaatgaatttgtacatgtgaaaactgatacccatcaggtactctagtcattctgggagattcttcatactgttgtcaggatgtttcttctctggactactgtgtgtattttcctattaaaaaggtttgcttttttctttttctcttaggagcctttaatctccccctttgttgagtgtcataggcactactgtctctctgttcttgtaacaagcattcatgtttgttctcagttgacccgacatatcatttcaactatatcaccattttcttcagcaccacatattaaaggaagcaatggccagtctttagatagccccagaataacccagaactttggacatatgttttgctccttttatttttctttcctgagagcgaaacagaatgcgaaaaatttttgtgtaactgcactgtgctgtggtgcacaaatacaacaaactttcttccttctatatgtgaccattcttggctttgtgttcacctaggtgctgcaaactcacctggctttagtcaccctattacatttaagttcatatatcaattgagaaaacaaaggggcctcaagtttttgattcaactatcatggtgttctcaacgtgatataatttgtgtattagatttataaagtattttcacctgaatttagtaattggaattttgaaaacttttggtatctttcagatatcttttctcatgatactcaaggcctcttaagaaagaagcttatagaagcatcattccaaaaagtgatattggatggatatgggagctgtggccctcagaatttaaacttaaggaaagagtgggaaagtgagggtaagtgtgaaggtcacaatggatattatgatggacatacaaaatgtaagacaactacctataacaaaaacctcactgttacaggaggtcaaaaacatgaaaaaactcaatttatgtcagttgctttttctaaaccatgtgtttctgtaagtaagtgtcaacatcaatttttgaaacttaccttttcttttaaaggaaatttggataatccgaatagtgacttagtccatgtttcaaataatcatttaaaccaattaaaatatagaactggagtaaatgttcagtcaaatatttctgaaaaggagagatttaaaaacgaggaggtgatttctaaatatgatcaatttgatggatctttgttaaaagtttgtttcaccaacaaataacacctcgttctgcctgtgatcaatatagaaaggtcttcattcattcatcattgcttaatcaatgtcaaggaatagataatttgggaaaatatcacacacataataaaactttgacagcctttaggcaggactataccctaaataattaccagtatatttgtgttgcagagaaaaatcagtacaataaatctgatacaacattaagccaaggcataagccccagaagacatcagaaaactcattttctacataaccattgcaaacgtaaaaaatgtgagaaagcctttcatgaatgcaccaaccatgtccatcagagtatctttattcaagagaagtctgccaaatgtaataagtgtatagaaacttttatccagtcatcaaaacatactcagcctcagagaatccatattggagaaaagtcacacagatgtaataatggtgagaaaatccttagtaaattgtcaagtctaagaaaacataagataatccataatgaagagaaaccttacaaatgtaaagaatgtgacaaagcctttaaccatcgttcacaccttactcaacatcaaataattcatactggagagaaaccatacaaatgtaaagaatgtggcaaagccttcaattctagttcatattttactagacatcagagaattcacactggagaaaaactttacaaatgtaaagcgtgtagcaaatgttttactcattcttcaaatcttcttgtgcatcagagaattcatactggagagaaaccttacaaatgtaaagaatgtggtaaatcatttaaagtgtcttcagcccttactcagcatgagagaattcatactggagagaaaccctataaatgtaaggaatgcagcaaagcctttaactgtaggtcgtacctaactaaacatcagagaattcataccggagaaaaactttacaaatgtaaatcatgtagcaaatctttttctcgttcctcaagtcttattgtccaccagagaattcatactggagaaaaaccctataaatgcaaagaatgtggcaaagcctttaattgtagttcacgccttactcaacatcaaagaattcataccggagagaaaccctacatatgtaaagaatgtggcaaagcctttaactgtagttcatcccttactaaacatcagagaattcatactggagtaaaactttacaaatgtaaagcatgtagcaaatctttctctcattcctcatgtctttctgtgcatcagataactcatactggaatgaaaccatatatatgtaaggattgtggcatctcctttaaccggtcttcaaaccttagacgacatcagatgattcatactggagagaaaccctacaaatgtaaagaatgtggcaaattatttaatcgatgctcaacccttactcgacataaaagtattcatactagagaatttctatagttgtagtaaatgtgaaaagagttttatccaaaatttagaacttaaaaatcaccatagagtttatagggaaaccgactttacagattgaataaatgggaggaagtatttaatcagaactcaaatctgaatgtgtcaggacttacacaaaaaaggactaaagcacagatccccactttaaaattaaataagagtatttgttatggaggattactctaaagccaaagcagttacttattttgttatgtgtttcaaatgagcaaaagcattgatgtttggacaagtaattattcagtgagcatgttatttgtattgaaaacatttgaaatttgtataaagcaaatcataatttaattctcagattagttgttataccttaatgcctagtgtttatataaaaacatatagtctattttttctgcatcagagctgtaagaggtcgttctatagtaggtgaacatcattaatatcaacttattttcttggaaatttaatggcaaatgtaaaatacatgaagaaaatctaaaagaggctctttgtgtttgaatcattaaacagtaatatgtgtaaacatatagtacatatttagggcattagtattctatactaaagtaaaagaggaatattctgaatttatttattacatcaattgctccttaagtagaaaaacactggtcagttatttaaaatactggcatacctttatagtacaatgaagtagtaatcttgaatattatttgatgtgttaaaaataaaaacatcttcacagatatcagagaaaagtgaaaactcatatctgaaagattataaatatactttatatcaattttccagagaacttaaacttctaataatattggtaatattctcatggttactattttatattctttcctgctttttgtagctactggtgtactatgacagttataataaagattatatgggggtatacttaaatgccatacttttaaaatcctgaatcattgtttataaagttttattcaatatttttctttgcacatgccctttttcagtccaattgaacacttagagatttttctttgctttcacttgcattaaatggaatatacagatgtactaagatagaaagaaaaaggtgaaagagaactatacaggcagaaatgcatgtgtgtgtacctgtcttcaaatggaaaagaaaatgatggatcacaacaggaaactggagaactgttgatttattacagttctcaaattagaaacctcccaaattcttaaagctaaattagcttttcattgcacactgaatttttctctgataaatctaatgtcttctgggttcagactttatcccgtacaaatccttttttcttgcctgtgattcatgtgagaagaattatataattttcttatttcaaagcttataaactattacttataagttctcatggattttaagaatgtttttgtaaaatttaatggtgctgtccaggtgtggtggctcacgccggtaatcccagcatttcgggaggctgaggcaggaggatcatttgaggtcaggagtttgagaccagcctggccaacatggtgatatctcgtctctactgaaaatacaaaaattagctggatgtggtggcacacacctgtaatcccagttactcaggaggcaaaggcaggagagttgcttgaactgaggagatgaaggttacagtgagccaagtttgtgcctcacactccagcctgggtaacagagtgagactctgtctataaacaaacaaattatctgtcatctacctatagacataaccctactgaggaggatggggataaaaggtctgcatctaagtcactttgaaaaacagtattttgattgaatgctgtaagactacacaaatgctgtattctactgagtaatattttattttcctacaaggatatgcattagcaattctgaaacagttttacatgttattatataatatatggaggctgtttctcagtgtagttcacaaaagttaaatggtgaatgctagcatgaatcttgtggtcctagcccaaagttggaaatatcaggatgaacccatgactaatacatctggatggatggatggatgaatagatataaagataggtaggtaggtaggtaggtaggtagatagatagatagatagatagatagatagatagatagatagatgaagcgatgtctaagatatctggaaggatggatggatggatggatggatagttagatagatagatagatagatagatacatagatagacgattcagagatagataatgttccaaactcttgagggccaagaactggtgacatcttgtatcaacacatctaggtctacaatcttggtttctaaacaacattcattaaaaggacccaagggttgaagttagaaaatacaagttgagctagagtatcttgtaaagccacaaagaaaaaagtgcttaataaaaatgatggggacttttcaaagggagccaacctgaaagacctcccaatggtccaagctccaacaatatgagcaataagttatgatagctttggattatggcccacagaataaagtaatactcatctctactgtgtgaataaaagagattaaataaggaaagaaggaatgaaatctacaatatttaaaatacagatcaatgtagttggataatgcaaaataaatcaacactagaacatcacagtaataattaccatagggaagattccccgaggaattcaaaaatttcaggaaaaacttaaacactaaagagtgtatttgggccagtctcggtggcacatgcctgtaatcctagcactttgggaggcctctgcgggtggatcacctgaggtcaggagttcaagaccagcctagccaacatggtgaaaccccgtctctattaaaaatgaaaaaattagtcgggcatggtggtgggtacctataatcccagctacttgggaggctgaagcaggagagtcacttgaacctgggaagcagaagttgttttgagccaagatcatgccattgcactccagcctgggcgacaagagcagaactctgtctcaaaaaaaaaaaaagaaaagaaaagtgtatttgcatattttaagtatctaccatctaatatttattaatacaattttttcttaatttcttagacttgtgactatttgaaacaaattataacactgtattgtaggatttataatttgtagttgtaaaatttataacacatggaataagaagataaatggaactgttctgtagcaaatttttcatgttttatatttaagacagtatagtattaactctaaaagtatggtggatatgttaaagattcatattgtattccctgcagcaaccactaaaaaatgcaaagaagtgtaatgtaaatgctaaaaaaggagataattataaaatatttatttgcacaatatttatgtatcttttagtcataatagcccaaaacaggaaacaaccaaaatgtccattaataagaaaatgaactaattgtatagcttttagaacaaaatacagctcaggaatatgaaaaaccaagcacacatcctggataaaattcataaacctgctcaatgagagaaaagttggacacaaaattgtactttatgtattttgtattttattccaggcaaaataatcctatggtgaaaaaaatcaacaagataatctctgcttgagaaaaaggaccaaagacaagtgaattttctgagggtgatgaaagtgttgcttcgaaaaggggtgaagtttatatgggtctatttatttgtctaacatgtacagttaaggtttatgccttgcaatgtatgtacatcttcacaaaaaaaatcttaaaaaaattaaatgggtgggggtagggaaagggttgaagtatagatgaagcagaagtggtacatgattagtagttgaagctgggggcaggtctatatattttatttttatgtctttaatagcatttgtataaatgtacaatattcgtttacaatgttagctcaggatcttgtttacctttggacagggagggagggagaaatttattttctgggtaggagtaaagctggttctattcctcagttatgtaaattatctgttataatccaaaaagctttacatgaatgtttctgtatgtaatgtggtatatcaataaaaaattaaatattacatatttgcaccagaatcctaactcactatctcagaatgttagcagcattttcttttgttgtaaagtggaacacaatctcatggcattagcagatgggtttgaatattctaaagtatcaacgtcctaatctcatgggcacctcttgggtctttccatttttgccttcatttgctaagtggcatgcttttgattttttgagatgaaactttttcccagcaaagtcttttccccacagtgatgctctgaaagccaggacacctagcacaggaccctgggcatagtatgcactcagtacatgtggagcatgttgatcaggaacaaaaggagtagcaaaggtcagttcctgcaaaggtgagtagataatacaggtatgactgaaaggctgcaactcaggagtaaacattttacattcattcaagagacaatttgcaactagtacaccaaaaaattttggcttgaagcagtactttggggacttggctaaactctgtaatcacttggagaactttaaacaatactgacgtctgggccctactccagggattttgattttattggtctgttgcaatttaggttttgggaattgtagggcctccgcatgtgactgtaatgtggagccaggggtgagacccactgtttcagggtgagggatgcattagctgtgtgtgatttccatgtgtgctgcaagtatttaacctatgaccactcctgcatttggagtcttggaaattgcagcaggaggaaatgtctctctacagatctattttttatgtcacttgcttttagagtaagaggttatttcaggcacagtaatttgatttaatctgttttcaaatactaaatctgaaaatactaaaatgaaaagaatttgcaaatgtgagaatttgcaaacatgtggagtgtgttcttatgtgctttccagtttctctgatgataagaaatgagtaatgttgggccttgatttcctaaactcagccctcagtcactttctcaaattatttgaagaccttccaagttgcttcagaagcattgtccaaaggagattattcccagtagtgaagaataatagatggatgagaatgtctaaggaatcctacttctgtcgcagaagtggcactctccagaacctcaagggcccatggagttcatgggctttggagtcaggcagagttgaccctgagtcccatcccagcctcttaatagactagttacttgacttggaacagttatgcaagacaaagcacaatgatactgattgcagtaatgggaacaattcattcctctctgtatccatgccctttgcaatgcatgtttttagctactcccatggagggaaagattctgtttttccagtccttggatctgactggccttatttgctgtggccaattcatacttactgttctagtgaaacaattaggcatgttttgctcctcattctagactttaattaaaattaaaattttatgatattttatttctactgtattttgctgtattcattctgctcagtattctagttcaccggtcctcttatctctgtttaatttagtggtgaacctatacattgtctggtaacttaattttgtattttcgtattctattgggctgtcgttcaaatgtggcttttaaacttcagttacttgttctttctacaaaaataaacattgattttcta

SEQ ID NO: 23 - DNA, 3273 bp, Homo sapiens
  DNA (1)..(3273): Granzyme B
ccaagagctaaaagagagcaaggaggaaacaacagcagctccaaccagggcagccttcctgagaagatgcaaccaatcctgcttctgctggccttcctcctgctgcccagggcagatgcaggtgagtgaccgtctccaccctcgggggcccaaccccatcccacaggtctcctgccctttctccacattcctgatccatctatctaccaggaatgttctgaactccagctcccattctaccaagaccccccaagtgtgatgctggataagctatcagcaggaatggcagagcagcaggccattctcaagaagagccagtgggtactatcccttccccagagcccacctttgtcacctggagagtaggactttcctagaagtaaatggcagaggatgggaaactagaaaagagaaatattaaattattctagagtaggcctggcttctgtttctgggataagacaggtgcttctctcactgtctacttaggagagaaacccagagctcagctgacagcagaattggtacaatcactgtcctcagaacactgttaatgtgtttgctcagtcccattctccaactctgcttttcttccctggcctttggtggctcccctctttccaaggatgaggcactacggcaggccccagcttccctgctttctagaattccaccagcactgctctaccagccctcatccagaggctaactggagccagtccatcatgcagccatgaacatttactgggcacccactacatgtcaggctctaggaaacaggatatgacagtatctagatccctccacttacaccctggccattagaaagcagcactatcctagacaccacaggactcataagggtcttggaaactcacctgaaacaaagcaaagtcaggagaggaatgatcaggagcctctgggatttcactgtccctaagacaggtatgctcgccttcaactacatatggaagaaagatttacagaccaaagtctgctgttcttccctttttcagagcaggaaattgaagccccttcctccaggccactcccaactccaggctatcccaggctcccaaatgcccaggagttctggagccactaagcaggtgcccacccagcagattccatgggtgcccacaagcagacagacttttccttcaggggagatcatcgggggacatgaggccaagccccactcccgcccctacatggcttatcttatgatctgggatcagaagtctctgaagaggtgcggtggcttcctgatacgagacgacttcgtgctgacagctgctcactgttggggaaggtgaggagcagaaaacagcccacaccctcctggaaacactccacagagacccctgccttcttcccaaggagctccctgggctcctgtgaacacacatgccaggaggtctccttagagggtgagaaaagggcagttaagtttgtggagagaggggaaggttggttccagaggtgctgctgaagtaagaaacagcagagtgaccaagcctgccatatttagaactgggggcatactttggcatagaatacaaactgaagcaattccacctgtgtttctagggggaaccgaaccctgagaaacctggtgcaattaccagaattccaattcctggggaccgactgtccccttaatttcccctcagctgcagccctgccccagctgtcacctgctcttcactgtctctgggctgtataccctgtgactccacccccatcctcactctgctctctgtgcagctccataaatgtcaccttgggggcccacaatatcaaagaacaggagccgacccagcagtttatccctgtgaaaagacccatcccccatccagcctataatcctaagaacttctccaacgacatcatgctactgcaggtgaggcacactcctgccactcttgctcttcttggtccagttggttccactccccctggaatgccggcccttccctcctttccatcctggcctcttggttagttcctatgcctcagaggagagggaagattgtgcagccccatcactgtgtcggggcccagaagttcgttggctgacctggactttcttgcctcttccccaccagctggagagaaaggccaagcggaccagagctgtgcagcccctcaggctacctagcaacaaggcccaggtgaagccagggcagacatgcagtgtggccggctgggggcagacggcccccctgggaaaacactcacacacactacaagaggtgaagatgacagtgcaggaagatcgaaagtgcgaatctgacttacgccattattacgacagtaccattgagttgtgcgtgggggacccagagattaaaaagacttcctttaaggtaagactatgcacctgcctggattggctcttgggagaaagatgtttggggaatatctgagacctggagactcaagtagtgggggactccttcacccactagactgtgatatttctctctggaaagagaagaggggactagactgagctggggagaaattagggcctctgcaaacttaccaggaggcttatggtggatggtgcttctttggaaggatgaatttgcaacactccacccactccaggtcacagatattaggaaactgtgcccactgggggtgcagtaattataaccaggtgtgtcttcagaggctggtacccaacgtggttaatgggctggtcctccatggtggacatcagccctccttgcccacttctgggtccttaaacagccaacggtcccacatacctccgatctcaggatctgggggacatgacggaggctggcccctgggatgaggtgaagcagtaacaatgtccagggccagagcttggcagctgggggccaccagcggcctgccctgccctctggtctcccacatgtaggctgtgcaagttggccttttctaaaagggggcttgagatggaagagagggcaggacccggaggagcatcagctcagtccttccactctctattcacagggggactctggaggccctcttgtgtgtaacaaggtggcccagggcattgtctcctatggacgaaacaatggcatgcctccacgagcctgcaccaaagtctcaagctttgtacactggataaagaaaaccatgaaacgctactaactacaggaagcaaactaagcccccgctgtaatgaaacaccttctctggagccaagtccagatttacactgggagaggtgccagcaactgaataaatacctcttagctgagtggaaaa

SEQ ID NO: 24 - DNA, 5428 bp, Homo sapiens
  DNA (1)..(5428): Perforin
gaagtgatgtgagtggtggctggtgcaaggagccacagtgggctgcctggggggctgatgccaccattccaggagcctcggtgaagagaggatatccatctgtgtagccgcttctctatacgggattccaggtaaggagagagcagggattggggggcctggggccctgggtggaggggaagaggctgatggagcaggaagtgctgtgacctataagacaagacacctgggtcacagacggtgcccatcactaactcgctgggcagccctgtgtccaccctgggcctcagtttcctcatgtatgaaatgaagaggtagcgtgcagtttctaaggccctgcaagtgctgacattaaagcttctaagaaagctggaaagaggctccctgggacagaataccatgagagtcaggatgagggctgagttcactggattagggttatgactgtgcccgcctcctagctgggatgagcccagggcctttgaagattcccctggcctctttgcctccctggggcgagccacgctgcctgaaattccacccttcaagtcacacctttgggcagggcaggaggctccagctataatgggggctctccatagccctcttgtctcagaacctgtggtacccaagggcaaaggcctttgaagagctcagcttggataaggttaggcttgggtaaggttagagaaaggaggttccagatcataaacaggcccaggcaaggccccagaaacaccttaaaattaggaagaaccttccagacaatcattgtccatagtaggcaataggggggcccctgtcactgccgaaggccacagagcttggcagggagtggcaaagaggggaggggcagcaagaaaggatctgaagagcaaccatcgaggcctctccccacacaaaatccaagggtgtggtcaggtctgcccctttttttttttttttttgaggcagagtcttactctatcacccaggcgggagtgcagtggtacgatcttggctcactgcaacctccgcctcctgggttcaagcgattctcctgtctcagcctcccaagtagctgggattacaggcacccgccaccatgcccagctaatttttgtatttttagtaaagagggggtttcaccacgttggccaggctggtctcgaacttctgacctccagtgatccacctgcctctgcctcccacagtgttcggtttacaggtgtgagccaccacacctggccaggtcggcagattttattctagaattcgggctgatgttattccataaagctcagagggagagccccaaagggaaaatgagaagaataggtgcaatataggacctcatttctcttccaattctgttaagggctcagtgggagggagagaggttagagagagtgacagagacaaagaaacagagtgagagtcagggtgggcaaagggtggcttgttctggggccaaaaatgacacttcttcagaatgaaggcttcctcaggtccccagacccctccctaaacctgctacagctactctgtcccctcttctgtggccacagccccctccccaccacccacagttgtgtcctggggacagagccatccacctagatccccattaggccttagggaaattctaaaaaggggctccccttggctgggcttttcccctctctgggcccatctgtacaatgtgggggctgaaccaggcctataagggacataccagctctgacattcattgaataatgacttaagagatatctcagcccctccccttccatgtgccctgataatctgtggctgtgggggaagggagcagtcatcctccatccctccacccatggcttcccagagcccaagtgccccctgtctctgcagctccatggcagcccgtctgctcctcctgggcatccttctcctgctgctgcccctgcccgtccctgccccgtgccacacagccgcacgctcagagtgcaagcgcagccacaagttcgtgcctggtgcatggctggccggggagggtgtggacgtgaccagcctccgccgctcgggctccttcccagtggacacacaaaggttcctgcggcccgacggcacctgcaccctctgtgaaaatgccctacaggagggcaccctccagcgcctgcctctggcgctcaccaactggcgggcccagggctctggctgccagcgccatgtaaccagggccaaagtcagctccactgaagctgtggcccgggatgcggctcgtagcatccgcaacgactggaaggtcgggctggacgtgactcctaagcccaccagcaatgtgcatgtgtctgtggccggctcacactcacaggcagccaactttgcagcccagaagacccaccaggaccagtacagcttcagcactgacacggtggagtgccgcttctacaggtgagagctggggctaggggtggggggctggaaaaggcgcgggaaactctgggtggtctaggagccctggaaaggcagagtcctccaatcaaacttggaggctgcttccaccaggaagaaactgcaatcctggctctcagacttcaggtgattcagccctgtggcctcctctcatccaggaggtcccaaatctgggagtgcccagtgagacatcaagtagagagaaagtgagtgagaccatgcctgagagtcccagcagggtgccatttaggtctagtgagtactgaaccctgcctttcctgggcacagccagccttccacagagtccttcctggatagggacagaggcaggagacctggccgggtcatccttcctcatcgctgtgtgaccttgagcatctcacttctctctgagcttcaatcatccactcaaccaatactcacacctgcctgtggcagggccacactgctgagcgacagcagtcactaccctagcccctgggagtaggaagtatgggacccatattccacgtctgagaaaggcacagtgtttgtaggccagacccaagtcacctggtctgattcatcagacctgggggccacgtttcctccacagagaggccgagcatggcccaagctgtcaggatcccgggcatgtgggacccatccagggggacggatggatgaaggccacatgactagttccaaagttcgacagataccatcagtgcaggatcattgcttttatgttcttttttactttttcttaaaaaaaaaatagagatggggtctcactatgttgcccaggctggtctcaaactcctgggctcaagtgatcctcccgcctcggcctcccaaagtgctggggttacaggcatgaaccactgctcccggccaggatcattgcttttataataagaaaattaaaaggaaagaaaaaaatgttattttgaaaaggaaaagagaaaatacctatacagagcactgaggtccctgaggggtgagagcggaggcattcctgccagccccgtgccactgtgcttgtgctctggagccgggcccctgggttccagtcctagttctgcccacttacatgtgaccttgagcagtcctgaaggagttatttgattgaatgggggaaatactcccctgggcccagctgaggtctctctcttctcgcagtttccatgtggtacacactcccccgctgcaccctgacttcaagagggccctcggggacctgccccaccacttcaacgcctccacccagcccgcctacctcaggcttatctccaactacggcacccacttcatccgggctgtggagctgggtggccgcatatcggccctcactgccctgcgcacctgcgagctggccctggaagggctcacggacaacgaggtggaggactgcctgactgtcgaggcccaggtcaacataggcatccacggcagcatctctgccgaagccaaggcctgtgaggagaagaagaagaagcacaagatgacggcctccttccaccaaacctaccgggagcgccactcggaagtggttggcggccatcacacctccattaacgacctgctgttcgggatccaggccgggcccgagcagtactcagcctgggtaaactcgctgcccggcagccctggcctggtggactacaccctggaacccctgcacgtgctgctggacagccaggacccgcggcgggaggcactgaggagggccctgagtcagtacctgacggacagggctcgctggagggactgcagccggccgtgcccaccagggcggcagaagagcccccgagacccatgccagtgtgtgtgccatggctcagcggtcaccacccaggactgctgccctcggcagaggggcctggcccagctggaggtgaccttcatccaagcatggggcctgtggggggactggttcactgccacggatgcctatgtgaagctcttctttggtggccaggagctgaggacgagcaccgtgtgggacaataacaaccccatctggtcagtgcggctggattttggggatgtgctcctggccacaggggggcccctgaggttgcaggtctgggatcaggactctggcagggacgatgacctccttggcacctgtgatcaggctcccaagtctggttcccatgaggtgagatgcaacctgaatcatggccacctaaaattccgctatcatgccaggtgcttgccccacctgggaggaggcacctgcctggactatgtcccccaaatgcttctgggggagcctccaggaaaccggagtggggccgtgtggtgagaacagtgagcttggaaaggaccagtatgcttggactgaaggggttctcacagtgggagccagggctgtcttcgtattcccattagaccaagcttgtccaacccgaggcccgcatgcggcccaggatggctttgaatgcggcccaacgcaaattcgcaaactttcttaaaacattatgagtttctttttgctattttttttttttttttagctcatcggctatcgttagtgctagtggattttacatgtggcccaacacaattcttcttccaacgtggcccagagaagccaaaagattggatacgcatcagacagatggaaaagggagattcagactgtttttcagggaggtggctgggtttacacgctaatcccgattcaccctgtccaaactgcctaagccctccgccattctcaagccctgcagtcacagctacacagatcacagcttcagccaggagctgggcagaaggccaagaggctgttcccaccaggctgctcagggctggtcttttaggacccttcccttgagccctctatggtgtggcaaagccttcattgccttaactggagccccatcagctccagctgctctgtcttctttgcccacaatgctttgcccctgagacaaatggaggcctgtcctgacctgtctcaccatgtacatagcttgataaagggccaataaatatgatgttatggtga

SEQ ID NO: 25 - DNA, 25255 bp, Homo sapiens
  DNA (1)..(25255): Fas-Ligand
cctacccgcgcgcaggccaagttgctgaatcaatggagccctccccaacccgggcgttccccagcgaggcttccttcccatcctcctgaccaccggggcttttcgtgagctcgtctctgatctcgcgcaagagtgacacacaggtgttcaaagacgcttctggggagtgagggaagcggtttacgagtgacttggctggagcctcaggggcgggcactggcacggaacacaccctgaggccagccctggctgcccaggcggagctgcctcttctcccgcgggttggtggacccgctcagtacggagttggggaagctctttcacttcggaggattgctcaacaaccatgctgggcatctggaccctcctacctctggtgagccctctcctgcccgggtggaggcttaccccgtcttagtcccggggataggcaaagtggggcgggcgcgggacgcgtgcgggattgcggcggcagcggcgcacgcgggcacctgggagcggcgggctgctgcgggaggcgttggagactggctcccgggggctgttaggaccttccctcaggcccgggtgctcagaacgctggaggacttgcttttcttgggccttgatgcgaagtgctgaccccgctgggcaggcggggcagctccggcgctcctcggagaccactgcgctccacgttgaggtgggcgtggggtgcggacaggaattgaagcggaagtctgggaagctttagggtcgctggagggggaccccggttggagagaggagcggaactcctggacaagccctgacaagccaagccaaaggtccgctccggcgcgggtgggtgagtgcgcgccgccccgcgggggcggggagagagcctgcagccttcagaacagatattgctcattttctggcagttctcagacgtaggaaataagtcagcaccgaagcagtggttaagccggagggctcggaagaacggcaccttttctttctcgaaaaagttatatgggggctgaatgagcttctggaggcttgtttaccgttttttattgtcacacagaaaaagaaactgccttgtctcccttccgggaattctctctttaagactgtaagtcgctgcctgagtggtttcattttgttttgtttttctgcccttctctttcttcttttgccctttcttagcttgcactcccatggtgatttctgcttggtctcctgctggggttggtggtactcgttcccaccgcacagaacccggcgcctattattggccaagaaacttgagcagcctgttttgaaaagtccctcgctcagaaatgccagcttgcagatggctaatcaaagagacgtggatccaggaggctcatttgagtaccggagcctctgagagtccatggatttttattttattgggccccaacaaagtgccaggcatagcgagagaagtgtttacaaatgtgatctccgcggattctcacgagagccatgtagtggggaagataaccacatccccattttacagatggcgaaatgaggttcagagagcttcagtaattcagccaagatcacacagctagtaaatgggagatatgggattgaactcagatctaattccaaaactcaggctgttcgctgattgcatctgatatccagattacaccaagaggctgagatgtctgggtccattttatgattagaaaaaaaaatcctgttcctttcagaaatagtgtgcactatttgggattctttagaaacttccttggagaaaattaatgattcaagattgagaaaacatttatacaacctcaggccacactcttctctctcttgttattaaccattgcaccactgcaatgttggctgctttgaaaatctcatagtttttggacagcagtattagtaaagtgtaagaaaattgtcaaagcttggagctatgcttgttgaacttttgtaccaatagcacctttaccagaggctgcgtgtttaaagcccgaagaaaactttgcttttctgaaagaatacacacacacacgcatatgtaaatattcatacatttatgtatatatacatattataatacctataagttaggtataacttatatttgtatatgatatatggcctaggaaattaaggcttattaaataaaatttataaatgcagatgagtcaaatacaaagatcagacataactctatcacctaagtaatcattgtttacgttttgcagtttatcttccatttctcccctctaatatgactcttttaaatttagttacacagaaattggttttgcgctcacgacatgcctaacatcaggcctttatccttaaagaagtttcaacactcttgtgtcacctcatgtgtctacagaaaatgtttgcttttatgccttcacggttatgttttcttagtagtagcaataaataaaatagatgcaaagtgctaattacttggaatacagaagcaaattttaattctattaatgggctggacatagatgggtggggagctgttttctgcttttcccctcttcccctagtcctctgactctggtgataactatagtcaacaagtatccccatccttaaccccttttgcttctctttctctttccttctctcaaccttcctggtgttagttttctctttcctatttctgagtgtttttactccgacacttacaataaaaaagtttgaaatcccaaaaagttgacaaatttctaaaggagacagaaaaagagtcaaacttactttacaaattaatttgagaaatagctgtgggttgcattttttttttttattgtgcatgaccctgttattggccaagaaacttgagcagcctgttttggaaagtccctcgctcagaaatgccagcttgctaattgaagggatgtggatccatgaggctcatttgaattccgaagcctctaagagtccatggatttttattttattgggccccaacaggttttgtcttgcattatttaggacattggccaggcaatcactggacagccagtttgctctcctttacattttgtagaatggttatcttatggtcaaaggaaagggagagggcctttggaaaataaagctgtgtatttacaagcagtcatacagaatagttttgtggggaaaataaagaacagttatttaatttgtaatttaatcatttttcttaaaccaacccaaagagcataaaatggaatatttatttatttttgtagcttaatttgtaatttaataatttttcttaagccaacctaacgaacatattgggctgtttattttcatttttaatgggccatatttacatcacaaaggacttgagaagtcttacaaatacaataaaatgataaaatatgaattaagacattagcaaccaggatggaaaaacacaaatttgtaaatgatggccaggtttgcaagcaaaaattaaattgataaatggcagcacccccactaccagctatagttagactgatgaaaaatcctctaatgttcatgcctgaaatacagttaccacccttagcagcaaattagaggcaaagaagttctggaatttggacgttgtctctgagtaagctctttgagacactggacaagtaatttccttctgaatactcttatactgacacataggagaagtgtcagtgtttcaaaggaatctctttgaaggctactacattgctttaggggtgccagattaccagagtaaactgccagtttgagagaataactgtttcttaagagatggtctgaaacctaagtaaggaaatccccccacttgaaagcccctaggaagttaattgcttttggcaaattatcttgggccccaaaagtcccttgatgagcacatgttttgtaataggtactaaagactatttacttatgatgaaaaataaaataacacaatttaaaacttgaaattgataaaaagcaacttgaaaccaaatttaggacagtgaacccatccctttcttatttttaaataggtaaatatagaaaaaatgaccacatgatgtgaaacaaaaagcaaatatttaaaaactacatttatactttatctcaccacactaatgtaaagaattttgattttacttataaattcttagccttgtctacacatatacataattgcatgtttaatttgagctatatatagtctgttttttgttcctttgcatgttacacaaacctttttctatttctacataatttttatctcatattttttattggatacattatagagagagcatttattaaatgagctgggattactataatttttattatttattttttaatttattacttatttttataatttactattgaaaaaaagcatttcttaaatgtactgggatacatatatatatatgactttttcttgttactaaaaaattactcatagaacttacatattaaaattttaggacttgtgatgaaaaataataaaataattcaaaacgataaaaagcaacataattttatatgttgtaccttgtacttccttataaggtacaacactacaatagccttagtgtgtagttttctttttgctatgtatgtatatatatattcataaaagtggaaaaataacatttaataaatcctctttattttctggaaaatccttgctttaaaaaaagtctttagctttttatatagttctacttctaacaccaattaaatatcttcaattcagtctcaagcaggaacaaatcttcagtccacttgcctacctttactgtctttgaagtgacagtgtgagtagtaaagcccaaatcagagagaaattgacttttgtaagattggtaacttcaccttccccggaaggaaatgaggtggttcttccctttgatcacaactgctttcttgatttgaaataaactgttgtacagcccagtcaccccatctttagacatttagaaatggcaatcatagttatataggacaactagcctgagtcccactaagtagaaatgatagtgaatttagtataagattatacctttaggctgggcaggtgactcacacctgtcacccagcacttcaggaggccaaggtgggtggatcatggatcacttgagattaggagtttgagaccagcctggccaacatggcaaaaacccaactctactgaaaatacacaaattagctgggtgtggtggcgtgcctgttatctcagctactcgggaggtcgcggcaggagaatcactggaacctgggaggtggaagttgcagtgagccaagatcatgccactgcactccaggctgggcgacagagtgagactccgtctacaaagaaaacaaagaaacaaaaaatcatacctttagagcaaggccagccttgtgaattagcaaatctgactacaaattcaatcagcagatgtactcagcccagcaaagtgagcaagcttactataggttgtgttaaggcatggactgggataaactggcaaaattagagtaaatttgacaatttgacattggattcattaatgatagcctgtccttcaatgaagtcaggcagcattgtgtttctattcacctctgtgttttgtgaggctataaaaatataagatatgagaaatgtgaatactttttatttgtgagggcagatatcttgaaaaagagagcgagaggaagtcagagtatgcgggtgaagactcttgtttttttgctgaggatttagctttggtttttagccattctcacagagatcattggtcctaattaactggttgttgttgttttttttcatgtgaatgtctgtaaggtttcaggcttgattttaaaaattgggcctatactcacagaaagacaaatactgcatgatctcgtttatatgtggaatctaaaagttttgaatccataaaagtagagagtagaatagtggttaccagaggctagttgggggcaaagttgggggatttagggagatattggtcaaaggatacaaaatttcagttaggaggaataagttcaagagatctagtgtacaacttgatgtctatagctaataacaatgtattgtatacttgaaaattactaagagtagattttaagtgttctcgccacacacacacaaaagaaaatgataagtatgtgaaggaatgcccaatgtaattagctcgatttagctaattatcttccaaaatatgtacataattatcttccaaaatatgtacataattcaagacatcatgttatataccataaatatatataatttttttatttgtcgaataaaaataatacaaaaaaaccctgggcctatactgcccacaggtagtggccacaggcagagctggtcccaagcccctccctctctctgtagtcccttatcccaggttgctttattcttgtatgacccacgtggcccctctgggcttgtaagggctctggggctgtattttaggactctatagcccttacattacccatttcctctaccaaaggtcatttctcttatcttcaagcttatttttggaagggtcattatttcttcatgagaagtcaaattctgatttgcaagtgctgaacacagatgccattagtctataaaactcttatattctcacatgtaaatgtagtaacctgctaacctcagattctgcttcctctaacctagttgccctgcaactgtgatgaacctcaaaatcaccaagggtacttccccattctcagagatcctgattccttaggtctatgtaggggccttagcactttttattaaataatgcatcactacaggattctgatgtctgtcggggtcttgagaactatttttctgactctagcactaaactcaaaatgtaatttcagatggaatttcctaggctcattcattttattttatttatggcttggccagtcatggatctaatcagtaacttgcaactgttgcttcaactacctctgtcctggactttccagagattggctttaagaaagaaagaggacatccctgggataagattaccatgtgtatttttatgtacagattttgaaaaacatacaaatgaatgggatctttgcttatctcttccatgtagaaaaatttattttacttctatttcaggttttcaataatgtagtaggacaagatgacatcactatatccctgttttttacacagatatattagagatgcattatcttattggaaattttaaactattcaataataaactattagtcttttagaatttctttttcctcaagtgttgataagtaactgaaagtctacaagcagacaagcagaattagtcggtggaacttcatttcttgctccatttttgtcctcagcagtagagggtggtgagatttcaacccagcctagcaggaccaataagtctggaaagaagtagctctagttcatattggcacctgctaattctagttctgaagaccatgggaaatctcttgcctatttagctcagtgatcatccaagatgggaaattcttgggctcagctgtgagggatcccaagtttatatgtaacactaatgtctcacaaatcaagaatccaagagaatcaagagactatagttcattccttatattaaattcttaggactgccaactgggtggctacagttttgggggctagaagtctgatatcaaggtgccaactggactggttccttctgaggaccacgagggcaggatctgttcaggcttgtagatggccttcttttccatgtgtcttcacattatcttcctctgtttgtatgtgtgtccaaatttcctcttctttttttttaatttagaaatttatactgtctacaagctttatatagctttagttaaaaaaaagcaaaaaaaaaaaaaaatcaaaacaaaaacagtgaagccaagacactcttccaaagtctggacccttccggccttccaaatacaagagctctggaagttgtatataccaaatttcctcttcttaaaatgtcaccagtcacattggattaaggcttaccctattaacaccattttaacttaatcacctctgtaaagaccctatctcctgatacagtcacattcggatgctcaggaagttagggtatcagtatcactatatgaatttgggagttgggggaggacacagtttagcccatgacagtcctgaatctcctttgctagatgcatgactgtgggccagtcacttcaccagttgggatactgccatctctatcagaaaaggggtttgggctaggtcatctataaagtcctttctgctctaaattgtaaatataatgagataccaacatttagtttaattgtttaaaattttagaagctaactggatgctttgctggtgtcaacactcccctttacaaaaaaaaattcggccgggcatggtggctcacgcctgtaatcccaacactttgggaggccgaggcaggcggatcacggggtcgagagattgagaccatctggccaacatggtgaaaccccgtctctactaaaaacacaaaaattagctgggcctggtggtgcacatctgtagtcccagctactcgggaagctgaggcaggagagtcacttgaacccgggaggcggagcttgcagtgagccgagatcgcgccactgcacctccagcctggcaacagagcgagactccgtctcaaaaaaataaataaataaataaaataaaataaaataaaataaaatctcactttctgtttctactgttctctcaagtacccctctgccttctgttacttctttgctgcattctgagaggaatggggtggggagcactctttcctgtagaaccccataacccatctattttcatcaatttatttgaaattcaaagccaggggttaaaatgtccactttcaatttgagatgtctaactttcagataaatctattaacatgcatttctaagtgacttttaagctaagcattttattttattgagctcgtatggaagggtaactattatacttgtataataaagtgcactttcaaaaatactcggttcaaatgtaaaataatattcgtaatattttaagacaaacctcctagaacttatatgtgtctttcttcccagagcagtctctatgggtgcctaaacaatactgcattattagatttttttcagtttataagccacacaagaaagttaacccatgtcatctctagaggcataaaaatagacagttgttctgagaaacatatctgtttattcctagttcagtaacagcgcaatgagatcctaaattatgaggtactttttgtttatcttattgtctcattggcaaccagcaactcctgttgcatttttgacatgggaatctatcagggtgtggttaataaagtacatttccatggtaagtattctttaagaaaaaataaaccaagatttcatcagagacagaaattactgcaaactgtacttaccagtttctggtgatttgtataactgagctttcaatttcaaaaattaaaaagttctctttagtgtaacatatttttgtgtccagtaattttacttcaaaaataaaagagaattttctttaccatcaaacaacgttgctgtaatgagtggtgatatatttagtcctagaggaccaaagagaaataaaatggctttgattatgctggtttaagaaaatatatccgatgaaacagaggttaatatttgtgatgtttgatttagtaaaattataagactaccaaagaaaactagaagagcaaaataaccaaaatttatataaagaattcaatgttgataattcaaaggtttagaattttttccacctttcaaatactaagttgctgttatagatttactaccattattacccagattttctattttactaaaaaataataacacagttcgttatgataaatcagtatagatctttaggctcaacacaaccctgctaccttttaaacttttttattatacaacaaacacatatgcattatcaagaaaagatgagtttagcaaaatgaagaaaaatagtcttatcaactagaaataagcaccattaaaatttctgtgtgttaaaagataatatgctgctgaaactttttttttcttgaaatgtccctcttttctttcacttttcattttcttaatccctaaccttctactgttgaattttctggaccaccgttataccccctcatcaatagggcatttttttctgcagtagctgagcacaatggtcatattgaagaaattcccttgtgggggctttgcctagaggtaaaatcctcttggccgggtgcgttggctcatgcctgtaatcccagcactttgggaagctgaggcgggagcatcttctgaggtcaggagtttgagattagcctggccaacgtggtgaaatgccgtctctactaaaaatacaaaaaattagccgtcatagtgtgcattcctgtaatcccacctactcgggaggctgaggcaggagaattgcttgaatgccggaggcagaggttgtagtgagccaagatctagattgtgccactgtgctccagcctgggtgacagagcaagactccgtctaaaacaaaacaaaacaaaacaacaacaacaaaaacaaagtaaaaccctcttcactgtgatgactctaaagcttgcttttgtctctctaaatcacaacaaaccgtttgcagtgtgatgctgtgctcaaaattgagaattctcactgactgttccaggcatctgtctactcattcttgccatgctgagggctgtcatttctcaccactgaatgcctttttttttttttttgtgcttctttttaaaagtcttttcctgtttgctttgaacttcaataaaaacagggggtaagaaggtaatatgcttttattttgtctgtggggtttttttcttccttcttttggttccttttcagatcctagctcatcaaggccatttgccacactgacactggaataagcctgaatgggggtctatatttcttccagtagttagtttaattcggtcattgagctgttgctctatttgtaaccgtcatgctagatccgagggctgactattcctgagaaagtgtggagatcctttcagactgccatggtgctagggcagagtttcagtcattatcttctgtgtctgctaattcttgcatcatttcttctactctgtaacctggttggctatgaaaagtgattcttcctcactgatgctgcaggcaatgggtgaatatccaattgttctctcaggttcttgtcatcggatacaaagaacaaatttcatgtgtccctgtttctgagaggttcaaagggagcaaatgcacagattctagcttaggatgacttccagcttctaactatttgtctgtgcattccatttcctcacccctgcgagaggttgcagtcatggtaacggctgttctgagaaattcagtgcccaaactggagggaggggaacacaaactcagcttcttcccaagcttcagggcagggctggcaagttttgccttccccgccagcaagagccctggctttaggggtcttgctacagttttcccagactggaggtcttggggctggattctggttcttagcgaattcttgccaaacacctcccctttccccagtatccatttgttttgaaggttctttgcaggcttcttgccaataattgtcttaaaacaaatggagttgtttgcatacctagatggagtaaaatatttaggaaactattctacaaatatgaaacagcccagatttgggccagaagtcctggtcctgagtctcttgttagccactcttaactgtgaattattggacaaatcatttctcgcactctgtgtaatctgtcacctgggtacttgatgatttaaaccaggaattgtggcccttctcataatactgtctcctaaatattgggtgaatttagtatatcaaggagggcagggcactatacccgtaggggactctctctctccctctgtctctttgcctttctcagatatgcatctttggtggcagacctggggttcaaaccacagttgttttgaaatttctctttccttctccactatgctccccctcactgaaactttaataataaaagtagcacacttattgggcatgtatttgttatgtgccaggttctgtgctaacagctttaagtgcattattccacgtattttcacaacaagcctgtgaggaagaggttatttccacttatagataaagaaactgagacttggagaatgtaagtgattttacccacaaacacagggcagtaagtgggaggccctgttcaccttagaacacctggcttctatcattcatggtgctgtttctagtgtggtttgaagaacctgagatccaaactgctatacaagtgacctgctgctttcttggagagagaaatctgaaagacagtggagccctcacattgtctttgcctgtgcacagcagatactgccaattttgggtgggttacacttgtttaccacgttgcttacttcagaaatcaataaaattctcttcatgcttttattttacaggttcttacgtctgttgctagattatcgtccaaaagtgttaatgcccaagtgactgacatcaactccaagggattggaattgaggaagactgttactacagttgagactcagaacttggaaggcctgcatcatgatggccaattctgccataagccctgtcctccaggtatgttacacaaaacatccagagattacagtgaaagtcacagttaggagtagcacatagtaatcatgactataataattttacagtttttggttcccctatattatataacataactgagagaaaaacaactatgaaattattttccaaagatgagttttatttatatttatcacgcttatttgatgtggttatggataaatttaatttacaagtgacatgcacctctgaaatgagaagactggtctatttggctccatttttttctaagcaaaaatgactcatttgtgaatatgaaagcttatcatgtcaaaactgattaggatctaccataacaatagtggaactctgaaagcaagagacttctcctcttaagggatatgtctcagcacttcccttcaatcagaaggtctctaagaaagctgtcctggcactgaagcctgcaaaatatatttgcattttgcagctgaataactagacgaataagaaaagcaacaggcagaaaccaacagcttttttttttaaatcaatactttgaagggcaaactaatttcagatcacaaatccttcaaacactggtaaattagaagctaagcaaaatgcaattgtgcaaacatttcttcaactttgagtagagttgaaaaaaggaaaatagcacatgggttcatgtgatagattaatagaacaaaaaaggactgtagtatgtttcatggttgtcctcccaggcttccagcactcaagctgtaaaacaggatgggtcctgtttgtgaaaagattctaccagtctccctgtgcttcatgtccagattttaataaccgttatggaaaaatctcccctataacccaacccatttatacttaaacccatttacacttaaatcttctccaacacgaataaagaatggcgtcctggctttattataacctgctaaacacaatcaatttgctctatgaattgaaatctttgttcataattttaaaacctaaaatgtaaattaaaatgaacaaaatatgctttgcacatcaaactgtcaaggatttttgtctattgctttttcggttttgctttgttttattttaatttaagaagtgaatgtaaattgttacaaacttttaagaaatacatttggatatatgagtcaaaaatttgaaaaaaaattttttttaacttttttttcttattattatactttaagttttagggtacacatgcacaatctgcaggttagttacatatgtatacatgtgccatgctggtgcactgcacccactaactcgtcatctagcattaggtatatctcccaatgctatccctcccccctccccccaacccactgtttatacttgctaagatagcaattaatttatacgaaaataccctgagaaaataatcaaaaataaaggaaaatattgtacacatgatatttcattatcaatatgatgtaggattccttaggtaaattctggaatatttaaagactgaaatagtatgtatcaaagtcatgttttctgatatatttctaatataatcctcaattatataaaccttcttaagtaatttccaactgatctggctggattaactgattctccctgatccgtctataaaatatcctggatggcatccaaccatgttaaatactcttcccacttcaattccctcttgttgaattttaggcttatcaatatctaagttgcttccaaatctgtttatgctcattagtgttgtgatattcatatgtaatttgattgaatattgcataaattaatgaaatacaaatacagagaaaagacagattttatttctaagaaaactaggttgagtgctttggagaattcaataaagatgagctgctaaaatgttgttgatgaattttgtgagggaaaaataaaagttaagtagtaggaaaaatcacaaaaatctctaaagccattcatagagattattggtatgtttatgttttcctttcatcaaaaacgaagggagggagggagggagggagggaggagaaaaaaagaaagaaatgaaaaaggaagagaaaaatagacaaacaggaaattataggtgatgcattatggatgtgacttaagaaagaacctgggattataataacttctatatcacaaaattgtcaaatgattatatagttatattttataaattaaaacaaaatatttacagtatttttaagtgatttcctatgtaaattgacatttttgattaaatgatcaaagaagtcctccccacatcatcatattcaataagaaggattctatggtatactgcacacatatttcatatatacacattgtacatatatatatatacacacctgttatatatatgctcatgcatatacatgtatgtatgtattatatgcataggaatgcaacaaaataacggcaatatctccagattgttgatatatagttttttgtttgtttgtttgtctgtttttttgagatggagtctcactctgtagtccaggctgaagtgcagtggcatgatctcagctcactgcaacctctgccttctgggttcaagcaattctgcagcctcagcctcccaagtagctgggactacaggagcacaccacaacaccgggataattttttgtgtttttaatagaggcggggtttcaccatgttggtcagtctggtctcaaactcctgacctcaggtgatctgcctgccttggcctcccaatctgctgggattacagacatgacccactgtgcccggcctgatacataagttcttattatactttcctgccttttccaacatttctataataagcatatgtaccattatactaaaaaaagtattttaaaatctgattttcaataaaacaactacttattttcttattttaataaattttgttttcatactttggaggaacgaaagaacctgtggtttactgtatctccattataccaaggaagttgtgctaggcacattctgtaagataattcattaaagagaccaattcattcagagaccagtataataccactagcaaaaaataaaattatacttggacttgggttctgttttctttaaatattgctacaatgttatatagccctatgcactatttttgaattttgttctgggaatctccagtttgttttttactattgacagactattatctttacttactaaaatagcatatatatttacatgtcataatttgctcatgtagtaaatattttgttttatcaaaaagaatatatgaagttattaaggaattcatgttcctaggaaacacagcagaaattaattttgctgtataggtgagcagagcagattaaactgcttatatttttaaaactagttataccattaacaattagagtcactagtaatgtttttctcacacttcccttgatattttctgtcactttcttcttaattctctattcccttaccttcatctagctttccccatagcatttttttagcacttgatatcaatatatttatttgtgtattgtctgcctgcatcccaagaaggtgaagtctttggtgatgaagggtttatcttatttcctgcataatatcaaacttctaaaaagttcctaggactcaataggcatttaataaacacctatcagataaatgaattttttaagagaacacattacataatgctttctaatagcaatacagtgacaaactttatttttaagtaaattaatgcaaatatgtatattatttaaaattgtttgtttttaagataacaagcctgatagataataaattttggcataaatatgttaatgcttatcaaaactcatcagtacatatcctgtcttttgatgaaaaagtaatagaaaggggagaacaaagagaactctcatgctcactaggcaggccgagtgcagctctgacagcaatgcaagagaaatattactatctccatcatatgcaggatgaaatttaggcttggagaaaacaacacttcgttaaagattttatagctgctcaagatttgaccaaggcttttaaaacttcaaatgttcttttccttattacactgtttcttatcaggatttgtggactttggaaagtaaaatgaaaagtcagagcaatgtgagttagtttgataatctcagtggccagtaacagctatccccactctgaatatataccaaccaacctctcccctttctccaaggaagttagttcttggcaaaggcatttcatgcagtgtactttgtcattctaaccttcctttttttttgtatgctcctgttgctaatcatcctatttctatgggcttcagtcactcttttagcttttgtcttgggagactttctgtctgttgacatgacttttaaaataatcttctcccccattgtatttatatctcattagcctaccccccctccccttgtgttttagaagagttttattgtctgtcatccctctatagttcccaccctgttacctgcccgtgtcctgttcaaacacttgctccttttttccttgggcaggtgaaaggaaagctagggactgcacagtcaatggggatgaaccagactgcgtgccctgccaagaagggaaggagtacacagacaaagcccatttttcttccaaatgcagaagatgtagattgtgtgatgaaggacatggtaagagtcttaaaatgcaattgaaagaggccaatcttggaatttcatgtagaaccatttataagacaatttgaaattggggcctactgtggtgctatgttgacacacaggaaagggaaggacaggtggctagggtaccgcagaaccaggtgccgagctaactactggtctagacctttatgagtaagtctaggcaattcttccagatataggagaatgagtaaatatgaaccctaggaacagggttcatcagctcaaatcaaaagctcagaaattattttttttctggccttgacttacgcttatataatggtgctcgttcatggccagaaaaattcagaagcctgcagatacaaggacacagaaatccaaaaggtaggtaggaatgctccccctttctttggggatttagtttgtcctgataattccatctggggacctgaattttcatggatatctcaatgtattctaaggacccagattgaagtataacagaagtgtttctagttttgtttgacatgaagaaacctctggacataaagcttttcccatccctattcagcctataaagcaatgtttctcatccctggcagtgcattagaattgcttagggagctactaaaaatgtttcatgtttaggtcccatctcagggcaattacatcagagtctctgagtgaggaccttggtattggcctgatggagtaagtctggggtagagcctaacattctacatttttaacaagctcccaggtgatgctcatgctgccagtccccaggtcaccctttgagtgttaaggctagagactagaggaacaggggagacgtctaagtattggtgaggtttgtcttggttgctgctaaatgattgctggccatttcaacctggggtttcctgttctgtgtttaaacactgactgtattactggtgtcatgctgtgactgttgatataagcagtggatctcaaaaatccatgcagctcctgcccaccattttcatagtctgcttataattagccgctataactaatagtttccaaactgattttctaggcttagaagtggaaataaactgcacccggacccagaataccaagtgcagatgtaaaccaaactttttttgtaactctactgtatgtgaacactgtgacccttgcaccaagtaagttttagtctttctctgattaaaacactagatataacatgagagttatcattttcctagggaagtaacactgactgagagttaagaattagggttctagtcctgctttgcctccaagcaactagatgactgtttgctcatttaaacactggtgaacttcctgtgtaggtgacactttgctggccacttaagctaaagatatgagccagacatatgcctggcatcaaggtatcagtccagaagcacagacagtcaaggaaagcaatggttattgtgtttcaacagcatgagaatagcatcagaagagacttatgttccaggtgttacaaattatacagaaaaacttttcaactctgcctgaggagatggaggtgaagacatgaatgtgtctcatgacttgaatcttgaagaaagaaaagaaagagcattaacaggtgcacatggatggaatgcacattataggcagggaaacagcagctgcaaagagacaaaggaagctcaggaaaacagaatacctggctggagtgtaggaaagactgagaagcgttcagggctgaatcatgaagggccttgtcttttaggctaaagaggttggttttgacccaaagttagagaacctgccttgtaagtcatcttgggaagcttttaggagttcatctaataggcttaagaaataagcacatgatgccttatgttttatttgctaggaaaattttatgtacagttgtcccaggctctcccctggccacaagtgtctgagagtgcccctatgatgacaggctaggtaggcattggggaagcagctgacttagtaaaataataacaataatagtaattccaaatatttcataatcttgatttaattttcttgtcatcataaccttttgaaatagataatattatttccatgttattgatgagataaaaggctcatggcagtgtgacttcccaagctcacctagtcaggtaatgggcagaggctgtgaactcagacaacctgattgtgaatgtttgtctgtctgaaggaaatcacacatgaacctcttgagtctcctgatcaccaccggttgctaaaagtggcagcctctaagggccagctgagtaccctccctgagctacatcatgggcgtggctatcacctggccattttcttggtctataggaattttttgaaattacttttgacagtttattttaagagctagtttaagctataggatttacgtgttcagtttattactaggtttaagtttatttttgtatccacttcatctctcttgtgtgtcactattttcctatcttcctttaactcttgaaatcttaagacagagtcattccttatgatatttttcatccagccatccaaattatattaacttgtgccagctttagatactaatttagaaatatttgaaggaatacgtttgccagagatgcaaagatgaataaaatggcccctaatttacaaagtgccattgaaaattataaaggaattattctgccaggcttttgaatttctcctgtatttttttttctagatgtgaacatggaatcatcaaggaatgcacactcaccagcaacaccaagtgcaaagaggaaggtaattatttttttacggttatattctcctttcccccaaccccatggaaagatgtgaagaaaaaccaatcactcttgattactagaaagtcctttatttaatcttaaagattgcttattttcatataaaatgtccaatgttccaacctacaggatccagatctaacttggggtggctttgtcttcttcttttgccaattccactaattgtttggggtaagttcttgctttgttcaaactgcagattgaaataacttgggaagtagttcacaaagatttgcctcattcttacctataaaaagctaccactttggtagatttatgtattgttaatttcttgcccctgaatgcagccttgagagctgactgataagaacaaatgaaattattcctcagctagtttctgagcaacagttttggggcattgagtggtattctcatccttcctatgaacaggtgttctctgcagcagcagaattggccaaaaatcagaagcaattcttcactattcattgagatctccctatgcaaaaagagaacacaagaagcaaaggcattcccaggaaacacattgcagggaacactttaaaaacttgtacttcactgcctcctcttcctcggcctaattgcttgtttttaattatttctccttcttaacttaaaatactatggggacacatgttatacaaaggtgacttagtagagtcagtagaaaagccaaaattagatattatcataattagtctagaaaaatccctttaagtcattcatcaactacagggtcacaccaactttcagtaacttagaagtattcaattttcccttctcagaacaattatctgtttcttcagttcagttgaagaagaaagtttgccttgcctttagcggttgtttagctgaaaatacatttgggatatttaagcactgtaattgtgctcagagacatacagattcttctatctcacattgactttaatgcatacacctattgagtatgtatgcttgagttatttgtgtgtgtatttcatttctgggcatccatagcaagttgatgttgacttgcttgtcctacggcttctgcatcctgccatagtcttgccgtccacatctttgctggacagagagtggtgcttgccatatggtaagtcaaaagccatctccttgctaggccagcctgtggtaattagatgactaattaagatatgtcctttcactagaacacttgacttagtagtacgaaagttccaaaatcagcggtctcctgcgatgtttggccacttttaagtttcactgaatttctcctttttccttcttatatttctcttagtgtgaaagtatgttctcacatgcattctacaaggctgagacctgagttgataaaatttctttgttctttcagtgaagagaaaggaagtacagaaaacatgcagaaagcacagaaaggaaaaccaaggttctcatgaatctccaactttaaatcctgtaggtattgaaataggtatcagctttccttgaaaagaaaaatagagaaattagtgatttggctttttgttacttccttttacttttttgtttcttgtttgtttcattttgtttgagatggagtcttgctccatagcccaggctggagtgcaggggtgcaatcatggctcactgcagcctcaaagtcctgggctcaagtgatcctcctgcctcaactgtgaccctgggactacaggcatgcaccaccatgccaggttaattttttatttttattttttatagagacagggttcactttgttgcccaggctggtctcaaacttttgacctcaagcaatccttctgcctcagcctcccaaagttctgggattataggtgtgagccatcacatccggcctgttactttctttatttaaacattgcttgtgtttgtgggtgcataggttaaaggggcctcacagatgaattatgatatggtacccaaattaaaagtaaacttgtacacaaaaaccgtaagaatcaacaaaggagggaattgagagtgtgctgaaaatgagctgaaaaaagaacttggccaacctccatgttccgtgttgttgttatccctgcagagaaacagcctttaccaggcatgggttcagtatccaagcctgagcaaagagattgctcttaaagtttgtcataagggcacagcttaactttctctggctgccggttgaccttatgtctcaccatatcttttcccaacatggtatcaatatatttcagatagcaagaaatacaccgagaaaagaaaccagttgcacttaatggaattattttcttatttggggccagggctcagtgggagttaggattctttaaattaatatggtaaaaaaaatttcaatttgagccattttctggtattaagaataagaatagttacagggaagaaaattttagagtagttatatttattatttattttaataagtctatatgaaaaataacctcaacctattttatgaattctttaggtttcttgcctttaaaaactaagacaatattgcttagtttctggcaaggccggaacctttcagaataaaaattgaatggtaaaagtaaccttcttaatcacttaatctagcttcctaattttatacatcaagcaactgattgtacttctttctgaattaaggaaaaattagaagttcacatttagaatattctaaagatatatttttatttgtctttctctgcttccattttttgctttctaggaaacagtggcaataaatttatctggtaaggcttttatcattttatttcatagagatggcatcctttagagtaataggccaatttcagagtaaaataatgttactaatttcagtgacatattatgggatcttgttatttctcatacaattctacctgctcagcataaagcatttatcaggcagtttgtttaaatttataatgaatactcatagttaaaaataatcaagtaacaataagacacaatagtctgaggcttaagaaacttttccttcataatcagctagatgtattacagaactcctgcctaaaaagatctagaggttaaagtgtactgtagactcaggtattatcagtgtacccaactctataacaacatacatgattccattcagttgttctttgatctgtgatttagagataagatgatcataaactctttgcttatacttttagatttgtgggtcattgatcattggatccataagagatgttataggtgatcttttccaatcctcttaatttataaatgagaaaagaagatacagaaatgttatgtattgtggcccaggttatttaacaaattactgggtatatggcaggatttggagttagaactcaaggttgtcttgtttctgtattcccctagtcagctcttcatagacctttaggacttagctatattctgaagtactataaaaagagaaataaacatggttttcactaatgggaatttcatttagaaaaacaaattttcagactattttctatttttcagatgttgacttgagtaaatatatcaccactattgctggagtcatgacactaagtcaagttaaaggctttgttcgaaagaatggtgtcaatgaagccaaaatagatgagatcaagaatgacaatgtccaagacacagcagaacagaaagttcaactgcttcgtaattggcatcaacttcatggaaagaaagaagcgtatgacacattgattaaagatctcaaaaaagccaatctttgtactcttgcagagaaaattcagactatcatcctcaaggacattactagtgactcagaaaattcaaacttcagaaatgaaatccaaagcttggtctagagtgaaaaacaacaaattcagttctgagtatatgcaattagtgtttgaaaagattcttaatagctggctgtaaatactgcttggttttttactgggtacattttatcatttattagcgctgaagagccaacatatttgtagatttttaatatctcatgattctgcctccaaggatgtttaaaatctagttgggaaaacaaacttcatcaagagtaaatgcagtggcatgctaagtacccaaataggagtgtatgcagaggatgaaagattaagattatgctctggcatctaacatatgattctgtagtatgaatgtaatcagtgtatgttagtacaaatgtctatccacaggctaaccccactctatgaatcaatagaagaagctatgaccttttgctgaaatatcagttactgaacaggcaggccactttgcctctaaattacctctgataattctagagattttaccatatttctaaactttgtttataactctgagaagatcatatttatgtaaagtatatgtatttgagtgcagaatttaaataaggctctacctcaaagacctttgcacagtttattggtgtcatattatacaatatttcaattgtgaattcacatagaaaacattaaattataatgtttgactattatatatgtgtatgcattttactggctcaaaactacctacttctttctcaggcatcaaaagcattttgagcaggagagtattactagagctttgccacctctccatttttgccttggtgctcatcttaatggcctaatgcacccccaaacatggaaatatcaccaaaaaatacttaatagtccaccaaaaggcaagactgcccttagaaattctagcctggtttggagatactaactgctctcagagaaagtagctttgtgacatgtcatgaacccatgtttgcaatcaaagatgataaaatagattcttatttttcccccacccccgaaaatgttcaataatgtcccatgtaaaacctgctacaaatggcagcttatacatagcaatggtaaaatcatcatctggatttaggaattgctcttgtcatacccccaagtttctaagatttaagattctccttactactatcctacgtttaaatatctttgaaagtttgtattaaatgtgaattttaagaaataatatttatatttctgtaaatgtaaactgtgaagatagttataaactgaagcagatacctggaaccacctaaagaacttccatttatggaggatttttttgccccttgtgtttggaattataaaatataggtaaaagtacgtaattaaataatgtttttggta

SEQ ID NO: 26 - DNA, 19144 bp, Homo sapiens
  DNA (1)..(19144): TP53
gattggggttttcccctcccatgtgctcaagactggcgctaaaagttttgagcttctcaaaagtctagagccaccgtccagggagcaggtagctgctgggctccggggacactttgcgttcgggctgggagcgtgctttccacgacggtgacacgcttccctggattgggtaagctcctgactgaacttgatgagtcctctctgagtcacgggctctcggctccgtgtattttcagctcgggaaaatcgctggggctgggggtggggcagtggggacttagcgagtttgggggtgagtgggatggaagcttggctagagggatcatcataggagttgcattgttgggagacctgggtgtagatgatggggatgttaggaccatccgaactcaaagttgaacgcctaggcagaggagtggagctttggggaaccttgagccggcctaaagcgtacttctttgcacatccacccggtgctgggcgtagggaatccctgaaataaaagatgcacaaagcattgaggtctgagacttttggatctcgaaacattgagaactcatagctgtatattttagagcccatggcatcctagtgaaaactggggctccattccgaaatgatcatttgggggtgatccggggagcccaagctgctaaggtcccacaacttccggacctttgtccttcctggagcgatctttccaggcagcccccggctccgctagatggagaaaatccaattgaaggctgtcagtcgtggaagtgagaagtgctaaaccaggggtttgcccgccaggccgaggaggaccgtcgcaatctgagaggcccggcagccctgttattgtttggctccacatttacatttctgcctcttgcagcagcatttccggtttctttttgccggagcagctcactattcacccgatgagaggggaggagagagagagaaaatgtcctttaggccggttcctcttacttggcagagggaggctgctattctccgcctgcatttctttttctggattacttagttatggcctttgcaaaggcaggggtatttgttttgatgcaaacctcaatccctccccttctttgaatggtgtgccccaccccgcgggtcgcctgcaacctaggcggacgctaccatggcgtgagacagggagggaaagaagtgtgcagaaggcaagcccggaggtattttcaagaatgagtatatctcatcttcccggaggaaaaaaaaaaagaatgggtacgtctgagaatcaaattttgaaagagtgcaatgatgggtcgtttgataatttgtcggaaaaacaatctacctgttatctagctttgggctaggccattccagttccagacgcaggctgaacgtcgtgaagcggaaggggcgggcccgcaggcgtccgtgtggtcctccgtgcagccctccggcccgagccggttcttcctggtaggaggcggaactcgaattcatttctcccgctgccccatctcttagctcgcggttgtttcattccgcagtttcttcccatgcacctgccgcgtaccggccactttgtgccgtacttacgtcatctttttcctaaatcgaggtggcatttacacacagcgccagtgcacacagcaagtgcacaggaagatgagttttggcccctaaccgctccgtgatgcctaccaagtcacagacccttttcatcgtcccagaaacgtttcatcacgtctcttcccagtcgattcccgaccccacctttattttgatctccataaccattttgcctgttggagaacttcatatagaatggaatcaggctgggcgctgtggctcacgcctgcactttgggaggccgaggcgggcggattacttgaggataggagttccagaccagcgtggccaacgtggtgaatccccgtctctactaaaaaatacaaaaattagctgggcgtggtgggtgcctgtaatcccagctattcgggagggtgaggcaggagaatcgcttgaacccgggaggcagaggttgcagtgagccaagatcgtgccactacactccagcctgggcgacaagaacgaaactccgtctcaaaaaaaaggggggaatcatacattatgtgctcatttttgtcgggcttctgtccttcaatgtactgtctgacattcgttcatgttgtatatatcagtattttgctccttttcatttagtatagtccatcgattgtatatccgtccttttgatggccttttgagttgtttcccatttgcggttatgaaataaagctgctataaacattcttgtacaattctttttgtgatcatatgttttcgtgtttcttggagaaatacttaggaggggaattgcgagtttggaagtaaaaagtagctgtattttgaactttttcagaagctctgagttttccagagcggttgtaccattttacactccaactagcaaggtatgggagttattatggttgtgccacagccttccggacattaggtattgtcagtctttctaatgtggtatatccttgtggttgtaatttacagttctctattgactaaggatgttcagcattttttcatgtgcctattggccattcgtattttgtttgtaaagtagctcttcgagtcttttacctgttattttggttttttgtttgtttttattgttcagttgtgggactgctttatacattctggatacaagtcctttatcagatccatgtgtcgtgaatgttttcttctgatctgttgcttgcctatttgtttgctttacagagtttacagtatcttaagaggagtggatttatcttttttatgttcagtatttgccttgtcctgtttaggacatctttttttttttttttaaccccagggtcatgaagatattatcttacattttcttttaggacctttatggttgtaagttttacagtaaggtccttgagccattaattaattcttaaaattaattgtttatggtgtgaggtgtaggagtcagtctctggtatctttcctgtatggaaatccagttattctgtctccacttgttgaaataggcttcctttctctactgaatgcttttaattttaattattttacagttggagtatagggctaccattttagtgctattttctttttttctttgttaatttttgagacagggactcacactgttgcccaggctagagtacaatggcacaatcaaggcttactgcagcctcgaacccctgggctcaagcagtcctctagcagcctcacgagtagctgggattactccaccacacccagctaactattttatttttttgtattgacaggatctcactatgttgcccaggctggtctcaaactgctggcctcaagctttcatcccatctcggcctcccaaagtgctgggattacaggtgtgagccaccatgcctgacctcttagtgctattttctatttatctcctctgttctctgctctctttaaacgttggaggaagaaacagtacccatcttacacaaactcttcagaaaacagaggaacagactgggcgcggtggctcatacctgtaatctcagcactttggtacgctgaggcaggggatcatttgaggtcgggagttcgagaccagcctggccaacacggcgaaaccccatctctactaaaaatacaaaaagtagctaggcgtggtgacacatacctgtaatgccagttactcaggaggctgaggcacaagaatcccttgaacctgggaagcggaggttgcagtgagccgagattgcgccactgcactccagcctgggcaacagagtgagaccctgtctcagaaaaaaaaagaaagaaagaaaaaatagaggaatatttcccaacttgttttcgaagccagcataatcctggtaccaaaaccaaacaaggacattataagaaaagaaaatatagaccaatattcctgttagcatagacatgcaacagctaaccaattttagcaaaccaaacctggtaatatagaaaaaaggataaataggccagtcgcggtggctcacgcctgtaatcccagcactttgggaggctgaggcaggcagatcacttgaggtcaggagtttgagaccagcctgaccaacatggtgaaaccccgtttctaataaaaatacaaaaatcaggctgggcacggtggctcacgcctgtaatcccagcactttgggaggccgaggtgggcagatcacgaggtcaggagttcaagaccagcctgaccaatgtggtgaaacgccatctctactaaaaatacaaaaatcagccggtgtggtggcacctgcctgtaatcccagctactcaggaggctgaggcagaattgcttgaacccgggaggcagaggttgcagtgagccaagatcgtgccactgcactccagcctgggcgacagagcaagacttcatctcaaaaaaaaaaaaaaattagctgggcatggtggtgggcacctgaaatcccagctactcgggagtctgaggcaggagaatcgcttgaacccaggaggcagaagttgcactgagctgggatcacaccattgcactccagcctgggcaacagagtgagactccatctcaaaaaaagaaaaagaaaaaggataaatacattctaaccaaataatgtttatctcatgattgtagctgattcaacattcaaaaattggcctggtgcagtagctcaggcctgtaatcccaacattttaggaggctgaggcaggaagatctcttgagcccaggatttcaagaccagcctgggcaacatagtcagactggtctttactggggggaaaaaaatcagtctgtgtaattcaccacattaacaaagggaaacataaaaaccctatgatcatttcaacagatgtagcaaaagcagttaatgatattcaacacatatgcatgattacaaaccaaccaacctcctagcaaactagggaaaggaaacttaacctagtttgataacagggcgtccacagtcggagttccactagcagcatacataatggtagaaaactcagtgctgccgggcgcggtggctcacgcctgtaatgccagcactttgggaggcctaggcgggcggatcacgaggtcaggagatcgagactgtcctgactagcatgctgaaaccccgtctctactaaaaatacaaaaacaaaaaattagccgggcatggtggcgggcgcctatagtcccagctactcgggaggctgaggcgagagaatggcgtgaacccgggaggcggagcttgcagagcctagatcgtgccactgcactccagcctgggtgacagagtgagacttcgtctcaaaaaaaaaaaaaaaaaaaaaagaaaagaaaactcaacgctttttcctctaagatcaggaactagaaaaggatttgactctcacaacgttgataccatactggaggttttaaccaggcaagaaaaagaaataatgagggccgggtgcggtggctcaggcctgtaatcccagcactttgggaagccgagacgggtggatcacgaggtcaggagatcgagaccatcctggctaacacggtgaaaccctgtctctactaaatatacaaaaaattagccgggcgtagtggcgggcgcctgtagtcccagctactcgggaggctgaggcaggagaatggcgtgaactcagggggcggagcttgcagtgagctgagatcgagccactgcactccagcctgggcgacagagcaagactgtgtctcaaaaaaaaaaaaagaaaaagaaataatgattagtggcccgatgtctcacgcctataatcccagcactttgggaggccgaggtgggcagatcacctgaggtctggagttggagaccagcctgacaaagatggtgaaacctcgtctctattaaaatattaaaaaaatagccaggcgttggccgggtacagtggctcatgcctgtaatcccagcactttgggaggccgaggtgggtggatcacctgaggtcaggagttcaacaccagcctggccaacatggtgaaaccccatctctactaaaaatacaaaaattagccgggcgtagtggcgggcgcctgtaatcccagctacttgggaggcttaggcaggagaatcgcttgaacctgggaggcggaggttgtagtgagccgagattgcaccattgcactccagcctgggtgacaaaagcaaaaactccgtctcaaaaaaaaaagaattagccaggggtagtggtgaacgcctgtagtcccagctactcaggaggcagaggcaggagaatcacttgaacccaggaggcagaggttgcagtgagccgagattgtcccattgcactccagcctaggcgacaagagcaaaattccatgtcaaaaaaaaaaaaaaaaaaggaaagaaaaaaaataacgattagaaaggaagaaataaaacacattcacagccagtatgattctatacatacatgtcctaatggggccaggcgtggtggctcatgcctgtaatcctagcacttttaggaggctgaggcaggtggcttccctgggaccagcctggccaacatggtgaaaccccaactctaataaaaatacaaaaaatcagccaggcgtggtgacgggcacctctaatcccagctactcaggaggctgaggcaggagaattgcttggacctgggaggcagaggttgcagtgagccgagatcgcgctattgcactccagcctgggcaacaagagtgaaactccggcagggtgtggtggcttacgcctgtaatcccagcacttcgggaggctgaggcaggccgatcacctgaggtcaggagtttgagaccaacctaacatggtgaaaccccgtctctactaaaaatacaagaattagctgggtgtagtggtgggcgcctgtaatcccagctacttgggaggctgagacagaagaattgcttgaacccaggaggtggaggttgcagtgagctgagatcatgccattgcacaccacgccgggcaacagagcgagattccgtctcaaaaaaaaaaaaaaagagtgaaactctatctcaaaaaaaaaaaaaagtcctaatggaaaatccataaaaagctaccaaaactaataaataaatatagcagggttgcaggttacagggcaatatagttatccctctatctgtaggggcttggttctgggactcctcacacaccaaacccacagatgtctaagtcccatatataagacggtatagtatttggatttaacctacacatatcctcccatatagtttaaattatctctagattacttacattacccccatacaatgaaaatgctaatgtacatgcaagtatgtatgtaagtacttgtactatattgtttagggaatcactggacatataggccttcaagactgataccagcagccactgttaagattctggtcaggcctgcccctgtttggggtctcagttgatctcattgccttcccacccagccaagggcacctgcatttctcttggctccctggccatttggaaggcctagttcagcctggcacatttgtatcctggcccactgatgctggtacccctgggaaggtcctgctctgaaaaacacggagattttagttgctactgaagatttgagagataaagacagggagacctgtctgtagacctgtgtccctccaagtgggattgagactttgggccccccatttcaggacagcacctcctggcctgttgactgaatagatccctgaaggaggtgtacttgcattaatggagtgggggtgggagcagtaccacagatccgcactaacaatcacacagttctctctagaataataatatagaacaagtgaaatagaacaattgcagaaagagctaacctttgttgagctcttactgtgtgcccagcactttcctcaactctacatttcccataatacacagagtactaggtaggccaggcttggtggctcacgcctgtaatcccagcactttaggaggccaaggggggtggatcacctgaggtcgggagttcaagaccagcctgaccaacatggtgaaaccccgtctctactagaagtacaaaattagccaggtgtggtggcacatgcttgtagtcctagctactcagcaggctgaggcaggagaatcatttgaatccgggaggaggttgcagtaagcggagatagtgccactgtactccagcctgggcaataagagctgagactccgtctcaaaataaaataaaataaaataaaataaaataaaataaaataaaaaaagaaaagagcctgccattaaaggagctgtttggtaggggatgttttgtcagtgcaaacaacagaaaagtgggctgggcacagtggttcatgcctgtaatcccagcactttgggaggccaaggcgggcggatcacctgaagttgggagttcaagaccagcctgaccaatatggagaaaccccgtctctactaaaaatacaaaattagccgggcgcagtggcgcatgcctgtaatcccagctactcgggaggctgaggcaggagaatcgcttgaacctgggaggcagaggttgcggtgagccgagatcgcaccattgcactccagcctggacgagagcaaaactctgtctcaaaaaaaaaaaaaaacagaaaagtgtaacaaacacttacagtaggcatgtttcttagcaaatctgatgacaaatttggcataaagaaagagagcatccctgaaaaaaaaaaaaagaaaaagaaagagagcatcctgcctgggcaacatagtgaaaccctgcctctacaaaaaaactcaaaaattggccgggtgcagtggctcacacctgtaatcccagcactttgggagtcggaggcgggaggatcacctgaggtcaggagttcgaaaccagcctggccaacatggcaaaaccccatctctactaaaaatacaaaaaattaatcaggcgcattggtgggcgcctgtaatcccagctactcaggaagttgaggcaagaggatcgcttgaatctgggaggtggaggttacagtgagtcgagatcacaccactgcactctagcctgggtgacagggcgagactccgtctccaaaaaaaaaaagaaaaagaaaaagactaaaaaattagccaggcaggcctctgtggtcccagctacttgggaggctgaggcaggagaatcactgagcccaggagtccgaggctgtagtgagccatgattgcaccactgtaccctagcttgggcaacaaagcaagaccctgcctcaaaagaaaaaagaaagaaagaaagaacatggcgggccaggcacagtggctcacacctgtaatcccagcgctttgagaggccgaggcaggtggatcacaaggtcaggagttccacaccagcctggccaacatggtgaaaccctgtctctactaaaaatacaaaaaatcagccaggcatggtggcaggggcctgtaatcccagctactcgggaggctgaggcaggagaattgcttgaaaccagaaggcagaggttgcagtgagcctagactgcaccactgcactccagcctgggcgaaaagagccaaactccatctcaaaaaacaaacaaaaaaacaaaacaaaagaaaacatggcaaagcctttgaaagcttgtctgggagaaggtgcgatgatagttgcataacttcgtgcaagatgctggtccacacaggggctgccccttgctctttctcgctctcttaacctctcatataacaggcttgtgtgttattcacatttattgagcccaagcaggtgcaaggcattgtgatctaatactttggtcagcaagacaacaagatagatcactgccctgcccttaggaagtgtatatgctattagaggaaacagataaaataaacaaggaaaagtatcagacaatgtaagtgctatgagaatgcaaatgaggtgatgtgaattaaaataggatgacttaaagtctgcacgggaaggagcctacccccatgttcctggctagccaaggaaccaccagttgattagcagagaagggcagccagtctagctagagcttttggggaagagggagtggttgttaagagatgagattaaagaagccgagacgggccattcgtgaggggtttgtaatgcagggctgaggagtgtccgaagagaatgggcaggtgagcggtgagacagttgttcttccagaagctttgcagtgaaaggaatcaaagaaatggagccgtgtatcaggtggggaagggtgggggccaagggggtgtccttccccatacagagattgcaggctgagaatgactatatccttgttaacaggaggtgggagcagggcacggtagctcacacctgtaatcttggcactttaggaggctgaggcgggccgatcacctgaagtaaggagttcgagaccagcctggccaacatgcaaagccctgtctctactaaaaatacaaaaattagctgggtgtggtggtactcgcctgtaatcccagctactcgggagactgaggcaggagaatggcttgaacccggaaggtagaggttgcagtgagctgagatcatgccactgtgctccagcctaggtgacagagagagactccatctcaaaaaaaaaaaaaaaatacaggaagggagttgggaatagggtgcacatttaggaagtcttggggatttagtggtgggaaggttggaagtccctctctgattgtcttttcctcaaagaagtgcatggctggtgaggggtggggcaggagtgcttgggttgtggtgaaacattggaagagagaatgtgaagcagccattcttttcctgctccacaggaagccgagctgtctcagacactggcatggtgttgggggagggggttccttctctgcaggcccaggtgacccagggttggaagtgtctcatgctggatccccacttttcctcttgcagcagccagactgccttccgggtcactgccatggaggagccgcagtcagatcctagcgtcgagccccctctgagtcaggaaacattttcagacctatggaaactgtgagtggatccattggaagggcaggcccaccacccccaccccaaccccagccccctagcagagacctgtgggaagcgaaaattccatgggactgactttctgctcttgtctttcagacttcctgaaaacaacgttctggtaaggacaagggttgggctggggacctggagggctggggacctggagggctggggggctggggggctgaggacctggtcctctgactgctcttttcacccatctacagtcccccttgccgtcccaagcaatggatgatttgatgctgtccccggacgatattgaacaatggttcactgaagacccaggtccagatgaagctcccagaatgccagaggctgctccccccgtggcccctgcaccagcagctcctacaccggcggcccctgcaccagccccctcctggcccctgtcatcttctgtcccttcccagaaaacctaccagggcagctacggtttccgtctgggcttcttgcattctgggacagccaagtctgtgacttgcacggtcagttgccctgaggggctggcttccatgagacttcaatgcctggccgtatccccctgcatttcttttgtttggaactttgggattcctcttcaccctttggcttcctgtcagtgtttttttatagtttacccacttaatgtgtgatctctgactcctgtcccaaagttgaatattccccccttgaatttgggcttttatccatcccatcacaccctcagcatctctcctggggatgcagaacttttctttttcttcatccacgtgtattccttggcttttgaaaataagctcctgaccaggcttggtggctcacacctgcaatcccagcactctcaaagaggccaaggcaggcagatcacctgagcccaggagttcaagaccagcctgggtaacatgatgaaacctcgtctctacaaaaaaatacaaaaaattagccaggcatggtggtgcacacctatagtcccagccacttaggaggctgaggtgggaagatcacttgaggccaggagatggaggctgcagtgagctgtgatcacaccactgtgctccagcctgagtgacagagcaagaccctatctcaaaaaaaaaaaaaaaaaagaaaagctcctgaggtgtagacgccaactctctctagctcgctagtgggttgcaggaggtgcttacgcatgtttgtttctttgctgccgtcttccagttgctttatctgttcacttgtgccctgactttcaactctgtctccttcctcttcctacagtactcccctgccctcaacaagatgttttgccaactggccaagacctgccctgtgcagctgtgggttgattccacacccccgcccggcacccgcgtccgcgccatggccatctacaagcagtcacagcacatgacggaggttgtgaggcgctgcccccaccatgagcgctgctcagatagcgatggtgagcagctggggctggagagacgacagggctggttgcccagggtccccaggcctctgattcctcactgattgctcttaggtctggcccctcctcagcatcttatccgagtggaaggaaatttgcgtgtggagtatttggatgacagaaacacttttcgacatagtgtggtggtgccctatgagccgcctgaggtctggtttgcaactggggtctctgggaggaggggttaagggtggttgtcagtggccctccaggtgagcagtaggggggctttctcctgctgcttatttgacctccctataaccccatgagatgtgcaaagtaaatgggtttaactattgcacagttgaaaaaactgaagcttacagaggctaagggcctcccctgcttggctgggcgcagtggctcatgcctgtaatcccagcactttgggaggccaaggcaggcggatcacgaggttgggagatcgagaccatcctggctaacggtgaaaccccgtctctactgaaaaatacaaaaaaaaattagccgggcgtggtgctgggcacctgtagtcccagctactcgggaggctgaggaaggagaatggcgtgaacctgggcggtggagcttgcagtgagctgagatcacgccactgcactccagcctgggcgacagagcgagattccatctcaaaaaaaaaaaaaaaaggcctcccctgcttgccacaggtctccccaaggcgcactggcctcatcttgggcctgtgttatctcctaggttggctctgactgtaccaccatccactacaactacatgtgtaacagttcctgcatgggcggcatgaaccggaggcccatcctcaccatcatcacactggaagactccaggtcaggagccacttgccaccctgcacactggcctgctgtgccccagcctctgcttgcctctgacccctgggcccacctcttaccgatttcttccatactactacccatccacctctcatcacatccccggcggggaatctccttactgctcccactcagttttcttttctctggctttgggacctcttaacctgtggcttctcctccacctacctggagctggagcttaggctccagaaaggacaagggtggttgggagtagatggagcctggttttttaaatgggacaggtaggacctgatttccttactgcctcttgcttctcttttcctatcctgagtagtggtaatctactgggacggaacagctttgaggtgcgtgtttgtgcctgtcctgggagagaccggcgcacagaggaagagaatctccgcaagaaaggggagcctcaccacgagctgcccccagggagcactaagcgaggtaagcaagcaggacaagaagcggtggaggagaccaagggtgcagttatgcctcagattcacttttatcacctttccttgcctctttcctagcactgcccaacaacaccagctcctctccccagccaaagaagaaaccactggatggagaatatttcacccttcaggtactaagtcttgggacctcttatcaagtggaaagtttccagtctaacactcaaaatgccgttttcttcttgactgttttacctgcaattggggcatttgccatcagggggcagtgatgcctcaaagacaatggctcctggttgtagctaactaacttcagaacaccaacttataccataatatatattttaaaggaccagaccagctttcaaaaagaaaattgttaaagagagcatgaaaatggttctatgactttgcctgatacagatgctacttgacttacgatggtgttacttcctgataaactcgtcgtaagttgaaaatattgtaagttgaaaatggatttaatacacctaatctaaggaacatcatagcttagcctagcctgctttttttttttttttttttggagacagagtctcactctgtcacccaggctggagtgcagtggcgggatctcggctcactgcaacctccgccttctgggttcaagcgattctcctgcctcagcccactgagtagctgggattacaggcacctgccccgacgcccagctaattttttgttatttatttatttttttttttagtagagatgaggtttcaccatgttggccaggctagtctcgaactcctgaccttgtgatctgcctgccttggcctcccaaagtgctgggattacaggcgtgagccaccgcacccggcctgcctagcctacttttattttatttttaatggagacagcatcttgctctgttgcccaggctggattacagtgatgtgatcatagctcattataccctcctgggctcaagcaatccccctaactctgcctccccagtagctaggaccacaggcatacaccaccatacccagctaatttttaaaattttttgtagatagatagagtctcactatgttgcccaggctggtctctagcctacttttttgagacaaggtcttgctctgtcacccaggctggatagagtgcagtagtgcagtcacagctcactgcagcctccacctcccaggctccatccatcctcccagctcagcctcccaagttgcttcaactacaggcctgcaccaccatgcctggctaatttttatttatttatttttattttattttattttatttttttgagactcagtctcactctgtcgcccaggctggagtgcagtggcatgatctcggctcactgcaacctctgcctcctgggttcaagtgattctcctgcctcagcctcccgaatagctaggactacaagcgcctgctaccacgcccagctaatttttgtatttttagtagagacagggtttcaccatgttggccaggctggtctcgaacttctgaccatgtgatccgcccgcctcggcctcccaaagtgctgggattacaggtgtgagccaccacgcccggctaatttttatttatttatttaaagacagagtctcactctgtcactcaggctagagtgcagtggcaccatctcagctcactgcagccttgacctccctgggctccggtgatttcaccctcccaagtagctaggactacaggcacatgccacgacacccagctaattttttattttctgtgaagtcaaggtcttgctacgttgcccatgctggtatcaaacccctgggctcaatcaatccttccacctcagcctccccaagtattggggttacaggcatgagctaccacactcagccctagcctacttgaaacgtgttcagagcatttaagttaccctacagttgggcaaagtcatctaacacaaagccctttttatagtaataaaatgttgtatatctcatgtgatttattgaatattgttactgaaagtgagaaacagcatggttgcatgaaaggaggcacagtcgagccaggcacagcctgggcgcagagcgagactcaaaaaaagaaaaggccaggcgcactggctcacgcctgtaatcccagcatttcgggaggctgaggcgggtggatcacctgaggtcaggagttcaagaccagcctagccaacatggtgaaaccccgtctctactaaaatacaaaaattaaccgggcgtgatggcaggtgcctgtaatcccagctacttgggaggctgaggcaggagaatcgcttgaaccaggaggcggaggttgcagggagccaagatggcgccactgcactccagcctgggcgatagagtgagactccgtctcagaaaaaaaagaaaagaaacgaggcacagtcgcatgcacatgtagtcccagttacttgagaggctaaggcaggaggatctcttgagcccaagagtttgagtccagcctgaacaacatagcaagacatcatctctaaaatttaaaaaagggccgggcacagtggctcacacctgtaatcccagcactttgggaggtggaggtgggtagatcacctgacgtcaggagttggaaaccagcctggctaacatggtgaagccccatctctactaaaaacacaaaaattagccaggtgtggtagcacacgcctgtagtcccagctactcgggaggctgaggcacaagaatcacttgaaccccagaggcggagattgcaatcagccaagattgcaccattgcactcccgcctgggcaacagagtgagaccccatctcaaaataaataaataaatatttttaaaagtcagctgtataggtacttgaagtgcagtttctactaaatgcatgttgcttttgtaccgtcataaagtcaaacaattgtaacttgaaccatcttttaactcaggtactgtgtatatacttacttctccccctcctctgttgctgcagatccgtgggcgtgagcgcttcgagatgttccgagagctgaatgaggccttggaactcaaggatgcccaggctgggaaggagccaggggggagcagggctcactccaggtgagtgacctcagccccttcctggccctactcccctgccttcctaggttggaaagccataggattccattctcatcctgccttcatggtcaaaggcagctgaccccatctcattgggtcccagccctgcacagacatttttttagtcttcctccggttgaatcctataaccacattcttgcctcagtgtatccacagaacatccaaacccagggacgagtgtggatacttctttgccattctccgcaactcccagcccagagctggagggtctcaaggaggggcctaataattgtgtaatactgaatacagccagagtttcaggtcatatactcagccctgccatgcaccggcaggtcctaggtgacccccgtcaaactcagtttccttatatataaaatggggtaagggggccgggcgcagtggctcacgaatcccacactctgggaggccaaggcgagtggatcacctgaggtcgggagtttgagcccagcctgaccaacatggagaaaccccatctctactaaaaatacaaaagtagccgggcgtggtgatgcatgcctgtaatcccagctacctactcgggaggctgaggcaggagaatcgcttgaacccgggaggcagaggttgcggtgagctgagatctcaccattacactccagcctgggcaacaagagtgaaactccgtctcaaaaaagataaataaagtaaaatggggtaagggaagattacgagactaatacacactaatactctgaggtgctcagtaaacatatttgcatggggtgtggccaccatcttgatttgaattcccgttgtcccagccttaggcccttcaaagcattggtcagggaaaaggggcacagaccctctcactcatgtgatgtcatctctcctccctgcttctgtctcctacagccacctgaagtccaaaaagggtcagtctacctcccgccataaaaaactcatgttcaagacagaagggcctgactcagactgacattctccacttcttgttccccactgacagcctcccacccccatctctccctcccctgccattttgggttttgggtctttgaacccttgcttgcaataggtgtgcgtcagaagcacccaggacttccatttgctttgtcccggggctccactgaacaagttggcctgcactggtgttttgttgtggggaggaggatggggagtaggacataccagcttagattttaaggtttttactgtgagggatgtttgggagatgtaagaaatgttcttgcagttaagggttagtttacaatcagccacattctaggtaggggcccacttcaccgtactaaccagggaagctgtccctcactgttgaattttctctaacttcaaggcccatatctgtgaaatgctggcatttgcacctacctcacagagtgcattgtgagggttaatgaaataatgtacatctggccttgaaaccaccttttattacatggggtctagaacttgacccccttgagggtgcttgttccctctccctgttggtcggtgggttggtagtttctacagttgggcagctggttaggtagagggagttgtcaagtctctgctggcccagccaaaccctgtctgacaacctcttggtgaaccttagtacctaaaaggaaatctcaccccatcccacaccctggaggatttcatctcttgtatatgatgatctggatccaccaagacttgttttatgctcagggtcaatttcttttttcttttttttttttttttttctttttctttgagactgggtctcgctttgttgcccaggctggagtggagtggcgtgatcttggcttactgcagcctttgcctccccggctcgagcagtcctgcctcagcctccggagtagctgggaccacaggttcatgccaccatggccagccaacttttgcatgttttgtagagatggggtctcacagtgttgcccaggctggtctcaaactcctgggctcaggcgatccacctgtctcagcctcccagagtgctgggattacaattgtgagccaccacgtccagctggaagggtcaacatcttttacattctgcaagcacatctgcattttcaccccacccttcccctccttctccctttttatatcccatttttatatcgatctcttattttacaataaaactttgctgccacctgtgtgtctgaggggtg

SEQ ID NO: 27 - DNA, 129370 bp, Homo sapiens
  DNA (1)..(129370): MIB1
atgagtaactcccggaataaccgggtgatggtggaaggggttggcgctcgggtagtgcgcggcccggactggaagtgggggaagcaggacggcggcgagggccatgtgggcaccgtccggagcttcgagagccccgaggaggtggtggtagtgtgggacaacggcacagctgccaactaccgctgctccggggcttacgacctccgcatcctggacagcgcgcccaccggtaagccgcggccacctggccagggcttgcgcgcgcggggggaaggggcgagctgcggtgggcgtcggtgtcgcggggagaggtctgcagtgggacacctggtgggcagcgcccggctggagcgagcggaaaggcaaagcgccaaaggaattctaggttccgaacgggtgaacaaacactttcagaaaagaccctctacccccaagggaaatgatggcagcaccatcaccgggatgctttcaagcctggaagacacaaagcaccgggaagagaacagacacaggtcccccaacccgactcctcctcttgggaaggggtctggagaggcctatctaataagccattgaaattaatcagccaccaagtgataactgtctgaagggaggcttgctttgccatatggtgctcagctgaccgtttataattgccaaggggccttggtacctcggatttgtggagatgccttttttttttttttttttaacctcctgtgacacagaattacttggagttcagtagccaaatgttacttgggactctggaatgatttttcatccaaattgttctattttatatctttatatcaatagagagaaaaacatcctgagctcttgaaccatttctttgtgttaaatactttttccaagtggcagatcggcgtgggggacacctgatgttattttttgttacactaacgtccgtctcagtaaggtgatgtcagaatcttactcattcacccagcagtgagtcagggtccttgattagtgaatcttgattagtgaattttaggggtctgttattgacgctagagtttctaaatgattaaaccaaaggcttgctttcacaaaataaataacaaattcattttcatatagattcatctttggtattatttatccttgatatttatccttgattctgtagaaaatagttcacatttaaaattgggtacttttcagaattcctaaatgagctacttctaagacattgagtttggcaaagccttacaaatcttggaatgggctcacagttattatcagtagcaataaagaaattaacacaagccaactcagtttttgaacagataattcgtaaaattgtgttccttagctggctttttaaaaacatttattaaaaaaaatttttgttttagagacagttgtctcgttttatttctccggctggtctggaactcctggcctcaagcaaccctcctgtctcagcctcccaaaatgctgggattacaggagtcagccacaaggccaggcttcagatagctttttgaatattaaaaagggtgtatgtacatgactagaagaaaatgaaaagattcaacagcacaaaaaggggcagccattgttaccagttttttgtgtagtcttgcagaatactctattgcatggcaagcatgtgtgtgactatactataaatctaatccccttttaagtgcaaatgataataaactatattcactcctctgcactttcgtttctttcactaaattatattggtgattgttccattgtttcatggctgcatagtattccagtgattggatacggtgatttatctaaccaggactttatcgatgggcgttttattatttcatgttttctttacaatgatgcagtgaatatatccttgtacatatatccttgtgtatatgtgttgagtatttctgaagaagtggaattgctgcatcaaaacattgcacatatttaacattttggtagatgttgactaattgctttttgaagacgttttgtgagttgaaactgccagcaacagtgtttgaggcctatgcctaatttctgcctactctttttttttttgagacagggttttgttttgttacctgcagccttgaagttttgttgtcgtgctagctcaagctaaagtctgaccacaacccttatttggaggaattcttggtatcagtaattgtagctttatgaggaaatttaagtatctagggtaaagtgtaacagattctttactacggtgatttttgaagggacattaatgttatctatatgtttgtagtatggggtgtatctatcatattaatagttttattatcttaatataaacgtagatgtttttcagaagtaactgttttagaatcttagtttaataagataattttatacattaatttgttatatgtagtggtttatcttgttcatttggtcttttaacaaacattttaagagcaggatagccaaccttcatatgaaatacttgttgaaatatattttaatttcaaccttttaaattcttcagggttttttttttttttttttttttagaactgagcaaaattgtaagctcctggctcttgttttgccccaggactataatactactttcagtgttttcctttttcttcaaaatatttaataatcagtgttcactgacattttattacattctataagattactcaatatttattaagtacttgatatttatttgcataatattaacattttaaaaattaacttttgtttttgaaacaattgtagtcttccagaaaaattacaaaactagtaagagttgccttttgccctttacccaccttcttcagctgttaatatcttagcaagtacaatgatcaaaaccagaaaattaacactaatacggtaatactgtattaactaatctatacaccttattcaaattttatttattcaaattatatgcagtggttattattagtgtcctactagtattctttttctcatccaagatcacacgttgcatttagtggtctcttccaatctgggtgagttcctcagtctttagtcagtgtcaaagtaatgaaaaacaatcttgttatctctcaaattgggtgtttctgctgctttttcatgattaaattcagattatgtattttcggcaagaatatcatagaaatgatgttttgcccttgttagtgcatcgtaccaggaggtacatggtgttcgtatgtctcattaattatagcgttaactcggctaggtcaccaggaattttaccaactgttgcttttgtaccagcaatgtgatgccagtatgaaaaagataacttgtatcttacatattattgtgaaaatacttttgacttcatgaagtccctcaaagggtcttgaggatttccctagaggttgaagaataacactttaaaagtcactgccctggagagaatctctatttgagcacatagaagcttgtataagaatgttcacagcagttactatggttttgagataaataaaatttaaaaaagaatgttcacagcagtgttgcatgtaaaaacagaaaattggaaaaaacttaaatgtaccttagcaggagactggataagttgtatgaatttgtatagtgcagtactgtatagaagagaatgttaagcaaataaagtaagttgcaaaagaaaacctacggtctgttaaagtgcggaacaaaactattttagggtagggttttgcagccttggcactattgacattttgaattggataggataattttttgttataggaatgtcctgtgcattgtaggcaggcatccctggcctctacccattagcagcagtagcaccccacctccttgtggcaacccacaatatctccagacattgccagatgtcccctagtgggggcaaaattgctcccaattgagactcattggtttagggatatgtacatgcgtggtaaaagtatgccacgtaaaggtaagataaacactaaatttaagagagtgggacatccttatggtgaagggagtggagagcacgattggtggaagtacaccaggggcatttaagtattttggtaatgttctgtgattaaacctaccccatggtgagtgcataggtgttaaacacacacacacacacacacacacacacacacacaaaattttattttttttgagacagtctccctctgtggtccaggctggaatgcagtggtgtgacctcggctcactgcaacctccgtcccccaggttcaagcaattctcctgtctcatcctcctgagtagctggaattacaggcatgcaccaccacacctgactaacttttgtatttttggtagagacggggtttcaccatgttggccaggctggtctcgaacacctgacctcaagtgatccatagcctcagcctcccaaagtgctgggattacaagtgtgagccaccacacccagccctttctatatttttgtgtgtgtcatatttttgtacttaatttaaaaaaaagccttatatttatcagagggagaactgaggttgcctttgattattcatcatttgttccctagttccacctatattatatgaatagaaaatttattgcagtatgattgggaattaagaaatgggtaaccttcagcataagattccttgcaacttttctgggagttaaggattctggagtggttggatcattgtgaatctttctgatacgatttttctcactacattttgaagattttgtctgggagttgtatgcgggtctctaatattttggcatatcagctttattttttctttcaggacacacatgatatgtttgaatttatggtctaggatagttaaactttgcagagaggagcatttagtatctgtttgagtgatataacgtctgtcttgtttcgagattcatttggctcatttgtagtgagcaagaagattttgggactatatgggatgttatttaattagtttggactaattttgtaaagtctgtagtcaagtaggtatagttgactttttatcatctaggcactgattttataggagttggagaaaaatgtgtttttatttatgcttgctttgtgttcacttgactacagtgttgtattgttaccagagataatggagaaaatgaatgtagatttcctgttaaggttctgtcattcttcgtgtcgataatacagagttagaggtatagaaaatcagctttattcaaaaccagcttctggtcatagttcattcaaactgttttgggggtagttctttgtccttgtctttgaccgctagcaaagaatgcctctccagtcatacgtggaaaaacttctcagatgttttgtattcagttgaaggtttaaaagggctgaccctggattaaaaaaatgaaatgaattaataatcctcagcttttctttatcagaatagagtcccctattctgatctgtttctagaaccacagtagaaaggggtatttgtcaggacacaaagccgtaggaaaaaacaggatttgagggaacaatgtttggggagcaggatgccacacctggaaaggatgaaatatcacaaaatgttttttattaatgacatctgcaaggaaaactttatttcctcatagatcctacctattttaaaggcttctgtaaaatgtctttcttattttatttcctccactaaaacaatgttgtaaattatgaaagtctatctagttcttaatagtccctgtagattgcagcttggttgagctgaggacttcaagaaatcaactagtagacccctgtgtcagtacttctcaaacttaaagcacacagatcacctggggaccttttaaaatgcagattctggttcagtaagtttgggattctgcgagagtatttctaataagctcataggtgatgcagatactgcaggctcaaggacacactttgaatagcagagtactaagtgactatttgtctacttgagatgccctgcgtttctgttttctccttttcctttcaacagattccaagccttgattgtttgttggtaatacatgtctttaaaactagattggcattattagttggggagaagagaagtgtgtacaactgaaataaaggagcatgtaacacctttctaatatatgtactttttgtaagtgtaatgctatcttaatgtgtattttcgatcctatactttccagcctgtccctctgattagattagctatttctttttgaatgtgttcccaggtagccacccaccagggtctctcctccaccctctataattgctagctagtgtgatatccccacatgtgtgctttcatctgttaaagcagggtatgctgtgttgtaattgtcttttgcactagattattagtttaagggaaagggtctgtgttattcttgtatctccattttctagcagaaccatgtctctggatgagtattttctgaatcagacacacttttcaaagagcttttgactcattggatcagagattagatagatattatcctaaaacaagataaaaggaaactcagattcagagagattaagaaatttgtccagtcacaaagctggtgagtggcagatagtagggatgaatgccagttgattgcttttcctcagtatcattctctttttcttttatagtatagtggttcagaaacatgaccacctgtaacactttgcttgtgggaaaattgataatgaaatgtaaaccaatttagaaatgaaactttgtgatacatcctgttgtaaattgttcagtgctcttttcaaaaccattctttttttgctttgctttgcttttcttcctctctccctccctccctccctctctcccccctccctctctcccccctccctctctccctctctccctctttccccccttctccctttctcttctttctttctggagtttcactcttgtcccccaggccagagtgcagtggtgcagtcttggctcactgcaacctctgcctcctgggctcaagccatcttcccacctcagccttttgagtagctgggactacaggtgcgcaccaccatgcacagctaatttgtgtatttttttgtagagatagggtcctgccgtgttgcccaggttggtcttgaacttgtgaggtcaagtgatccatctgccttggcctcccaaagtgctgggattacagctgtgagccatcatgcccagcctttttttttttttttttttttttaaagagtttcactctgttgcccaggctggagagcagtggtgtgattatagctcattgcaacctcgaattcttgggctcaggtgatccgcctacctcagcctcccgagtagctaggactataggtgcacaccaccaagcctggctaatttttttttattttttatttttcttagagttgaggtcttgctgtatcacccaggctggtctcaaactcttggcctcaagtgatccttcaacctcagcatcccagattgcctggattacaggcatgagccactgagccctgcttgtttctttctagtgtgtcttttttgcacagctaaggttttactgtatacatagtttgtttcattcttttttttccacttgacgtgtgttttctgtattccttataaataatctaatatgtacttcctatatggtaaaataaggtgacatttatgtcttaactacttagagagaaatatatatgtatttccatataggtatgccatatgtactgttcttcagctttctttttaaatgaatattgtcttggacatcttgcagtgttagcacataagaatctgtcttattctttttggtcggtacatagtatttaatagttaaaaaatatattacttaactattcttttgatagacatttatagtgttttcttttttgtcattttaaacaacactgcaacaagtatctttgtgtatacatacctttgtgtactaatttttagcttttaaattaatttgttacaggaatttctgttataaatgacatggctaaatattgtcctcactgactttgagaacatttgtcttttaatagaggaatttaacttgttcatatgtattgtgacaactgatacattttttctaattactgctaccttactcttttttttttttttttgaaatggagttttccttttattgcccaggctggagtacaatggcgcgatcttggctcatcaaaacctctgcctcccaggttcaagtggttctcctgcctcagcctcccaagtagctgagattacaggcatgccccaccattcccggctaattttttgtattttcagtagagaccgtgtttccccatgttggtcaggctggtctcgaactcccgacctcaggtgatccacccacctcagctttccaaagtgctgggattacaggcatgagccatcacacctggctgctaccttactttttaactttccagttttcttgtatttttttttttaaccagtgagttagaaattttatcacctttttttctgctctgctaattattaccttttaatatttaacaaacagattgaaaaattaggttttttttgcatgtagaaaaactaaacagtctctttaattactcctgcccatacttctttctttatttttttgaggtggagtctcactctgttgcccaggctggagtgcaatggcatgatctcagctcactgcaacctctacctcctgggtgcaagcaattctcctactgggtgcaagcgattctcctacctcagcctcctgagtagctgggattacaggcgggtgccaccatgtccagctaatttttgtattttatttttattttttttgagacggagtctcgctctgtcgtccaggctagagtgcagtggcaagatctcagttcactgcaagctccgcctctcgggttcatgccattctgctgcctcagcctcctgagtagctgggattacaggcgcatgccaccatgccccgctaacttttcatatttttagtagagacggggtttcaccgtgttagccatgatggtctccatctcctgatcttgtgatccgcccgcctcggcctcccaaagtgctgggattacaggcgtaagccaccacgctcggcctaattttttgtatttttagtagagatggggtttcaccatgttggccagactggtctggaactcctgacctcaggtgatccacccgcctcagcctcccaaagtcctgcgattacaggcgtgagccactgcgcccggccatctcctgccccacacctcttacctttttcattgtgttggttttatgtaaattttcaggaaaattagtcccaaatttttgtttgcattgtcctttctccccaaccatactcctgtaaatatatgcttctttttatgttgtaagatttgctcagctgggcacagtggctgacgcctgtaatcctagcactttgggaggctgaggcaggcaggttgcttgagcccagggatttgagaccagcctggacaacatggcaaaaccccatctctacaaaaaaatataaaaattagcccaccatggtggtgtgtgcctgtagccccagctatttgttggtgaggctgaggcaggaggatcagttgagcctgggaggcagaggttgcagtgagctgagatcatgttactgcactccagcctgggtgacagaatgagacccagtctcaaacagaggggaaaaaaaaagaaaagaaaaagattggctcataaaattgcattaaacgtcacagttattattattattttatttatttatttattttgagacatagtctctgttgcccaggctggggtgcagtggcacgatcttggctcactgcagccaagtgattctcctgcctcaaccctgcaagtagctgtaactacaggtgtgcatcaccatgcccagcaaatttttgtatttttagtagagatggggtttcaccatgttggccaggctggtctctggagctcctgacctcaagtgatcatccacctctgcctcccaaagtgctgggattacaggcgtgacctgccacacccagctcacagttatattattaataattaattggatttaaaattgtagttctttcttattactgctgcttatactatatctcatgtcattcccttctcattttattgggggaaaaatcctttccccttcctttctttcttcccttttcttcccttcttttctttctttctagtagtttgagtccttgcaggcctgaaaattgctttattttgccacactgtctctctcacccctaaacctgactgatatttggttgaatatgcaattctagattcaaaatatttttctgtcagaactgcctccttgttctagcatttaatgttggatatgagaagtcctatgcttgtccatgctgtggttatttgattaacttaatgtaataccactgttggacattaataggtttttgggactctgtgtgtttgtgtgtgtgtgtacacaatatgtcacaggtagtttattatatataattatatttagcttcttgtaagaaaacatattagtcccatgaaagagtttttgttgttaaagcaagtaattgagcttcatataaggctgtcagatcctccagcttgagctggtcagcctttactattgtagtagtactggggtcgttttatcttttattctttattccaaacacattggctcaaagtcccagctctgctcttgaggacaagctctgccctcagcagaagatgtgacattgtcatatctgctcaactatcatataatagtattcaaattactgaaatgttacatgctttataaagtttttttttaatgaggaaaattgcccaattaatatttatgtttgtatgtggtcatggataattatgttacctgataagggagaaaattttcagttagcagttagaattgggtcagccagctttttcctttaggaaataaatggattagataaatttaagtataaatattcctctggctttgaaaaagctaataactaaagctattcatacaacgaactcatgtaacctgggaaatacacatgaaacaaaagatatcttttcacttcaattagattgacaaaaattaaaagtctaattatagtatgtattaatgaagaatataaggaaacaactctccaggccttgtggtacagtaaatccgtacaaccactttgagaagcaacttggcaacatcttgtaaattaaaaaacaaaaaacaacaaaaaacacatgttctgcagctgaaaacatcttccaggtgtatgttcatgagattctcaggcacatatttacaaagatatgtatgaagaaattcattgcaatattgtttattaaaaataataattgaggaattaaaagtttatatacagactaatgaaaacataagtaaaatattagcagttaaaatggaagaattagatgtgtgtttgccaaatacatgttgagtgaaaaagcaagtttcaaagggctaacatagatactgtgctttttcttttttttctgccccctccctaccccaatactgtgcttttaaagtacatttttgaaagactaaaaaattatttatggaaaaatatatgtagaaaaaggatgagtagactgaagggattaaaccttcagaatgatattttggtattttgtttctcaaaatattctttatttttatttatttatttttgagatggagttttgctcttgttgcccagtctgtagtgcagtggcatgatctcggctcactgcaaccttggcttcacaggttcaagcgattctcctgccgcagcctcctaagtagctgggattacaggtgcctgccactacacctggcttattttgtatttttagtagagacggggtttcaccatgttggccaggcaggtcttgaactcctgacctcaagtgatccacctaccttgacctcccaaagtgttgcgattacagtgtgagccatcatgcccagcctgaaaatatttttttttgttaaatgagatgagaccaatttgatttcatttttgaaaatttcagtttaatagtaagtcaagtctaagttttgtttgtttcaattcttggttttactggatgctgtagctcaaaaagagacctcaaaatgacagatcatagatcctaataaaaggagtgcatttctttttctttctttcgtttttttttgagatagaattttgctcttgttgcccaggctggagtgcagtggcgcgatctcagcccactgcaacctctgcctcccaggttcaagcaattctcctgcctcgatctcccaagtagctgagattataggcgcctgccaccacacccagttaattttttgtgtttttattagag[450 bp omitted]aaatataaaatcagaaattccagaaataaacaattcatacattttaaattgcatactattctgaatagtgtgatgaactctcctgcctgggaccaaatctgtcaccgtgtccagcctccccacactgcctatgctgcccacctatttagtcacttagtagctgcctcttatcagatcaactgtcatggtattgtggggctcgtgttcacataacccttacttgactttataatggccccaaagctgaagagcggtgatgttggcaattcagacaggtcaaagagaagccatcaagtgcatcctttaagtaaaaaggtgaaagttctcagggaaagaggaaaaaatcctatgctgaggattctgagatctacagtaatgaaccgtctatccatgaaattgtgaagaaagtaaaagaaattcatgttagttttgctgtcacatcttaaactacaaaagttagggccacagtgcctaagtgcttagttaagatggaaacggcactaaatttgtgggtggaagatgtgaacagaaatctgttccagttggcagcagttgggttcactgttatctgcactttaaggcatccgttggggagtattggaaagtagtccctttggatgaggagggtctacagtatttctgacaacaacgaaactctactctgcaccctcctccgggacacctgtatcagccagtcatagcacctctttaaaggtctgcatcctagttccttgggaccccttctttaagtcatttttttttcattgtttccccacttctaggggtggtgtattatgtggtttgtcttgtttagcttgtcttatcatgtctgggaacatagttacagcaatttaaccatttcctcagatggaactaggaacacaacattttttatctttgtaagcctgtagattagcactacgtagtgtaaacaggttcttgtgaactagtctgatacctaagttatctttaaacttttgtttctgagggaaaatgggttctgaattgtaaacaactggctttttttttttttttgagacagagtctcactctgtcacccaggctggagtgcaatggcactatctcggctcactgcaacctctgcctcccaggttcaagcgattgtcctgcctcagcctcctgagtagctaggattacaggcgcgtaccaccacgcccagctaatttttacatgatttcaccatgttggtcaggctgatcttgagctcctaacctcgtgatccgcctgcctcagcctcccaaagtgctgggattacgggcgtgagccaccgtgcccggccaacaactggcttttataaaatggacttgtggaacacaaccaagataaggtagtatttaaattagtggaggagataatgtcataagaaatggaaaacagcagatagtccagacattcatttttggctttggaatacttatttatttatatatttattacttttttaaaagcaaatttactttcatggatatttgcttgggttagaattcgtttatattctcagagcacacttacgataagagtatttggtttcctcaggagtggatttattgtcttgatgataattttattcctaaaccaacaagaaatggagcagagactttgtaatattaaaataaattattgtttaatttgtggcagttttgcagggctagtgataataaatcccgagagctttgaattgaaatattttacatcatggtgccttactcatcccttaccccccagtttctttgcaggggatagtagaaaatgcagtagcttaggagccaggaaatcaaggattttatcaattgagactattaactagtggaatggattaacatttactgagctccagtcatgtgtcaggcattgtatactttatctcgttgtttgttaggcttcattttattgatgataaaataggccatgagaaataaactaacttgtccaagactccacaagtaataagttaatggtggagattcaaatcttggtctgtcagtcatttttttccctccatttcgagccttcattcatcacctgtaaaatgaaatcagagtagttcaaggtacacaggtgttctgcttctaaaatcaaattatgagtttttaccagttagtgcagttatttcaaaatgtataaaattcttttttttatttttttttgagatgaaatcttgctctgtcacccaggctggagtgcggtggtgcaatcctggctcgctgcaacctttgcctcccgggttcaagtgatccacctgtctcagcctcccaggtagctgggatcacaggcgtacaccaccgtggccggcaaattttgtatttttagtaaagatggggtttcgccatgttggctaggctggtctcaaactcctgatcttaggtgatctgcccacctgggcctcccaaagtgctgggattacaggcgtgagccaccgcacgtggagtcaaaatgtattttcttaattttatgtttcacctcattaattttttgactcctatgtaaaaaaatgccaaaaatataaacaaatccattattaaaattgccagttttatgtctagttttgagaacttgtttcttttggaatgtgtgtggcattatgcatacttgtaatagactggcagaggcttccaaaatagaataatttgtctaacagaaaaggtatgaaggagttgtgaactttgggtgacacattcacagacattttctttttttcctacataatcctttagcagctcaagacattttcttaatgcattttcttaatgcaactcttactatggtaagagttggaagtagatggtgtggtggtcaactacactatttacattaacttaaaaaagacagtcttttaggccatgcggtggctcacgcctgtaatcccagcactttgggaggctaaggtgggtggatcgcttggggtcaggagttcgagaccagcctggccaacatggtgaagccctgtctctactgaaaatacaaaaattagccggttgtggtggcacatgcctgttatcccagctacttgggaggctgagacaggagaatctcttgaacctgggagacggaggttgcagtgagccgagatcatgccaccgctctccagcctgggctacagagtgagactctgtctcaaaaaaaaaaaaaaaaaaaaaaaaaaaaagacagtctttttttttttttttgggacagggtcttactctgtctcccaggctggagtgcagttgtgcgatctcggctcactgcaacctccgcctccctggttcaagcaattctcctgcctcagcctccaaagttgctggaattacaggctcatgccaccacgcccggctgcttttttgtgtttttagtagagacagggtttcaccatgttgaccaggctagtctcaaactcctgacctcaagcgatccacccacctgggcctcccaaagtgctgggattacagatgtgagccaccacacccggccagtcttttaacattttaaaatatgtctgagatttatttgaatattgaaataggatttaataacttatactctaaatccagtagagtgcatgggggaacatgatgccctagatacgtaattattctttaaataagatccatgctaggtgcggaagaaaaaccacaaaaaaccgtggtagagtgaatgaagtgctttaagaggccatgttttgtgatcagacccagttgggtttgaatttgaacctgccacttactaatgttgtgtgacttcaggcaggttacttgtctgagactcagtttcttcatccataaaatggggataacaattgcttactttttagaattgttgggaaggttaaataaaatgtgtgtaaagaaccaagcttggtactaatagatagtggctggtattattaataacaacaatcctattttcattaatttagtatttctctagagaaaggaatgtggactttaccaaccagctggcaggtcacaaaggccttgccctcactgggaattttaattagagttgaggcaatttctaaaccagttaaatattttgatggttcagggaaaataagatggatattcttgttggttaaccctccttagtctctgtaatactttttgttacatttgatttgcggttaaagttgaatgaatccataaattagaatttcttggtttgttgaatgacatcaacagttatgccacaataagtagttacatttaaataaaggttgacttgtaaatttttttttttttgagacagagtctcactctgtcacccaggctggagtgcaatggcgtggtcttgactcactgcaacctccgcctcctgggttcaagcaattctcctgcctcagcctctcaagtagctgggactacaggcgtgtgccaccacacccggctaatttttgtatttttagtagagacagggtttcactatgttggccagactggtcttgaacgcctgacctcgtgatccacccgcctcggcctcccaaagtgctgggattacaggcatgagccaccgcgcccagctgacttataaattttttttgatgttaggtgaaatctttgaatttgggcaaagtttagggtatagttaggcaccatactagtctagaaggactgtttcttttttaaaaaagttttaaaatttattacataacatttaatgtatacaagtgaataaatgagtaatataaccaataactgggaatccatctagaaagaaagcattactaataacatttgaacaccctttgtagtatttctcacttgcattctttcccctcctcgcctaaggtaaccagctgtcacaaattagtttttatcattcccatgagtttctttatattacacatttgtctatatctgtaaataatagtattgtttcaacattttgtattctatacatatgtgtgtatatatatgtgtatatatatatatgtatatatatatttttttgagacggagtttggctttgtagcccaggctggagtgcagtggcgtgatctcggctcacggcagcctcctcctcctgggttcaagcgattctcctgcctcagcctcccgagtagctgggactacaggtgcgcaccactgggcccagctaatttttgtatttttaatagagacggggtttcaccatgttggccaggctgttctcgaattcctgacctcttgatccgcctgcctcggcctcctaaagtgctgggattacacttgtgagccaccgtgcctggcctttgtattccatatttaaaaaaattcagcattatggtgaagggtatgtccatgttgaattgcgtggccgttgaacattcatttttggtattccattgtatccctaatatatgtatccattctgttgttaatgaacaattatgttgtttactttttacttttgctattatacgaagtgataatttagagatttttgttctgttgaagcacttcatatgtatttaactgcttgtagtgaaaactctacttttctctttcagccatcatttctacccagaaatttaacattttacttaaatcagtgctttgtgagtttgagctattttcattaggtctctgaagaatgtagttattgatcttaagcaacatgttttactattttcataaaattttccaacaaaaatacttcagctatacaaattctctaagttgttaaactcaggcaagataccattaaaacttagagcagatggtcatttgagtattagtagaatgggtcaaaagctgtcatcaggtggttcatttaacggcggcagatgtcttcataaagcctagcaaaggaaaagggcattaactccttagggtaatatggtattctatagaaaggaaaaaaaagaacttaatggatccagttaaggaattaaattttatgaaataaaaattttaaggaaaaactgttgccagggctaatggttttagatgaaaatgaattgggtggatgtagtgagggaaacaaaaaagctaccactgtacagtaagagattagtaaaatgttggtcttgtttatttaatgccctttcttctgttttatgttttctttaaataccaacttttgttttgaagtcaattaattgtattctcattaaaaattctgtagtgctcattttggtagtggaatgggttgctttgtttacatttttcaattcttagtgttagtctgtttcacagctgttcagtagctttgttggcatttgaagtgtgggaaccaagaaagcatttggatgtgcttttgtgtgcattaatggttttcctgaggtattctttaaaaccatgaattatagaatttttttaaccagttgtcatgtgtgtttaaatggttccttttaaagaaagcctgtacacagattatgagctcatgactgttatcattgtatgttgtggaaaatgaacttagaaatgaaaaatatgtaaatgaggcagtggttgcaaactggacagtttttttctgttgaatggggtagttgggatacattttccctacgtctttcatcaaccaagtcacatttgaagagctgcacagtcagttaattcaggataaacttctaagtgtgcagtgaatactgatttgtttagtctattttacttttttgtgatgatggaactaaatcagatttattttagaccttgttcagaaacttagccattttgtggacatttactgtcattggtatttgatattaattgtggtattttttgtcggctttcctgtgctaagacagatacagttattagaatctgatttcaggtgtttggcaatgaggttgctttaaatcaatatgtaatcaattccatataatgtccattttggaaaaataattttataattatttctatattattgcttctaacacaaataccaaaagtttacaaaattagttgcaaaactattctcggtcacacaaagtggttttttttttttttaaggtaaattgtgaaacccataaacaaaaagattttgaagaactgtcataattgtctggtgcagggctattaaactgaatattaaattttcatgaaactgccatttgtaaagagaagtgccaacagtaacaatccatttaattagttttttaaaattcacactttaatactgaaatacaggtatacctctgttttatataggcattatacacagttctattcctggaagaccaaatgtatatttaaaatggaggagaggcatgccggatgttatttttcaaagatggccacaccagtctacatcccatcccacctgctcttcttaggagacaatgacattccacctaaagaggctgcttccctccctcagtggacctgggtggacatttgtaactgcctcaattaatagagtatagaggaagtgacactgtgaattctgaggtttggtcacaaaaggcaaggcagatgtcgcttgtctgtccatgtctgtctgtctgtcactgtctttcccctcaggattcacaacctgcctgcaccgggagctctgagccaatgctgagaaaacataaaagtgctaggttaagaattgagtagtatattttaccattttaaggaaagtctttctaagcacgaagcctcagaagttacacacatgccgatgagagcacacatagaaaatgtgtacccagaaaacaatctggaaacccccaccaaactgctaataatgggtgggagtacacggtgggggggactttcacattttgttctgtatgcttttgagttgtttaaagttttattataagtgtgttattaattttataattttaaaaagaaaataggaaataccaattttttcctctcaaattggcacagattaaaaatactacttcagtgcatgttaaagatgtgtcaagaaagccagtcagatactgctgaaagggaaatataaatggatacaatctctatagaaggcacttacagagtgtttcaaatgccatcaaaaactttgaccctgccttcaatgttttaaaaaggcacattcaaagatacttgtttgtggcagataaagacaaaaagttaacataaccagtgttgaaaatatgggactattattatgtaaattatgttaattaacagagggaaattctatacaattattaaaccatgttgtagaagaattattactgacatggtaaaataccatttttaaagtagtttgcaaggaactacaatgtgacatttttgcatctaaattgcataatacatgtaatataaaaactagaaaggtaattccctggatgtgctgatgggattagcctttgtggttttccaagttttctacactgagtgtatattaatcctaggaagcagctgggtgagtaggagcatttaacatgaagtataagcatcagagatgccatgtatgccactttaaactaaaaacaaacaaaaacaggaaggaacctaagcaaatctttacagaaaccaactttcaaattactttagttactttagtaatatggtatataattgctatttagaagtttttatttattttaatcttttaattcacagatgaataattaaatgttccccatatacagtctctgaaaaaatttaaacttttattaagctctttgatttctgtataagtattgcaaaatttgtctgggataggtgatgattctgattatgatattatttaaatagatgactagtgcatttactaaatctatattaagatgaagttaagtgcagtataattctttatatgtatattttgctttaaagtttttgaaagtgtgtttacctatcactttaatttttttctgtttttttttttaaatgaagtttctgtttctaggagtttctaacaatttagcctcacaatgtctctttccatgtgaaaggaagtgttttcttaatttatagatgagaatattggtcccagagtatttaagttgattttgaatattaagtggatagtaagttatacaagtaaattcttaaatcacatacgcttgtttttaccatttgaggtagcagttttaccatattgtatacaggttagaaatcatgtctgatcttgttaatttctagcgtaactctataatttatctccaagtctctggctgtattgcatgtttctgctaagcaaagtcgttcctggttcattgaacatactctgcttttctgtgatttcttcctttcttagaaagatctactcgtccatcatttctgtggaacttttcctgattttttttcctgtttagtttctaaggcgagtttctatcaatggagacctgggcttgtatttttttattagatattcttattttttgttggtgactcccttcttgtttttaagcagagcagttctagatttcagtttattatactgtttaattgctaaatatttctaatacttaacctgtttcctcttgaatgatctcgtttagactttctcatttatatcctctacatcttttgtctcctgacccatagctaccaagccctaaatatctctggaaccatttctctcaatttctactgtcaacaccctaatttaagctaccattatcttagctggactgctactaacttcttttaatctgactccctttctctagccacttttacttttttcatatcttttttctccacactgcagcaggagtgattttttattttttttattttttttatttttttgagttagagtcttagttgcccagactggagtgcagtggcatgaacatggctctaagagtgatacttgaaagcagcagagggcatgcctgcagtagtaataaagaaatagttctggatgaatcagtagccactcatgtccactatcttctgtccctacagtcaagcatttatgtgacaggagactgcagaaggattgcacataaaacatatttggtgttggggtatcaggcttttttgtagtccactaggtatcccagttctttcaggtgttcgttcccttcctccttccttccttgcttccctccttcctgccttccctccctcttccttcctgatccttgcccctcccctccctttccctcaaaacaggcataccactcaggtttggccctttgtttagaatctggttatctgaatatagaaaatgaataacatagggtttgtttttctttcttatcgggaagtacccagtagtgtattatattagtaatatgaccacttttgtactctagtttttacatatgtagcatgttacttgatttttagaacacgttgtctcacctttaaagaatatattacattccccaaaggggactgaggttgtgagaatgaaagggctcctttcttctatttaattatggaaatgttctaaatggatacaaagaggaagataatgtaatgaactcccatgtacccattacccaacttcagcacggctaatcttgttttacctaaatcccactttacttcccctctgcctccctccagttattttgaaaaaaaaaacaaaacaaaacaaaacaaaaaaaccccacattattttatacgtaaatacttctgataaaacgaccttttcaaggacataaaagtaaatacagacggagtcagaacttgaatccaggagagtgtcacttttggacagataatacagcccttgcttggtcagcattgagcttgaccatccaggatgtgtttataaagtagtgacactgatgttgacaagccacacattgttgaaaaaaaaatcctagtttttatttattgaacaagtgatattaatataacaatagaatagtaaaggagtattacccccaattatttcacctgaaaatgaaggttgttttcattacttatattggtaccttttatagttctaatgtctgtctcattcatccatgtgattaattttagtggaggtcattttaccaagtgtttattttttctagagcttattatttcttgtttcctaaggggataaaaccccactatagtgtattgtttcctttaaaatagggaaacttgcttcctaatcattttctaacttttcctgactatgggaaaaacttgtcaatatctaagggtggtaaatgcttaggttaattgatagtttgtttccatgatatcatgaaggcaaaatggtcttttcttttggagtaattgtttacctagaaaatagttgaaaattctttcaaagatttctgaggttttgtagtctgaaacatctccttagtgataaaggattctttctttctctgtgctgaacttaagttctagtttgtggatgagagcgaggaaagagttactgagatgtgttcttactaatgaaaaagggagcagagggaaaatatatataattcgcatttattaacgtagttgagatccattatcttgaagctatatgtgttaaatttgaagtgttatttcctaatttattagaatatcttgtaaaatgttctgttcttatttttttcccccaaggaataatattcaaataaataaaatttgtgattaatctgagcatgtgtccttgttttaataggcatcaagcatgatggaaccatgtgtgatacctgccgccagcaaccaatcattggcattcgatggaagtgtgcagagtgtacaaattatgatttgtgcacagtgtgttatcatggagataaacatcatttaagacatcgcttttaccgaattactacaccgggaagtgagaggtagggagaacccttttcttcttcaaccgagggtttttgtttgtattcaagttatgtacttctgggccttaaaaataggattagcaaatagcttctgacagttggtttactaacaggaggtacccaatagtaggatagaagtggaccaaatctgccatataacaagagaagagctctttgaagatggagctgtctgtacttttccaaggtaatctgggctattctttctctggcttagagggttagcactactctacatttggaaatacaagggtatccaaaaagataccaattgttttcttctcactatgccttctagtctgttaattgatatcagatgaatggtagggctcattgattgagtcagtaggcatttattaggactatacaacatctactatgtttatggacactagaagataaataagacacatagtattcttaaggagtttacaaattaaaggaaataatgagtcagtgattatcatgtgatgttttagactgtgttagagatatgtattaagtgtcttaggagcaaggagagaggagtattcattgttaatgggggcggagttttaggtaatgggatcttctcatgtagatacagatactgcaaaggagcgagaatccagccagtcatagggaggcagctaggagtaggagtagataaatagattttggagtcatacctctcttggtgtagatcataatcgtgccacttattaactgagtaattttgaacaagttggttatttttgtcttttgtttgcaattaaaattaaggaataataaagacactgtaaaaatgaataaggctgggcgggtggctcatgcctttaattctagcactttgggaagcctgaggtgggaggattacttgaggccaggcgttcaagaccaccccggacagcatagtaagacctcatctctattaaaataagtaaataaatgaaaagaatagaacaataaaataaaattaggaaaacaaaacaaaaatctccaaacctttctgattatgtgaatgagaaagatgtagaacaatagggatacatggtcttggagaaccaagctggaccagatacttgagtgtagaatctttatcaaggttcataatcttctgtaagtatgtagtactgtgagaacaggttagtgtaggtaaaatccagaccacagatgtattttaccgatacatacatatattaatcccttttcatactgctatgaagaaatacccgagactgggtaatttataaaggaaagaggtttaattgacttacagttcagcattgctggggaggcctcaggaaacttataatcatggtggaaggggaagcaaacacgcccttccttcttcacatggcagcagcaaggagaagtgctgagcaaaaaagggggaaagccccttattaaaatcatcaggtctcgtgagaactcactatcaagagaacagcatggaggtaaccgcccccatgattaagttacctcccactgggtccctccctcgacgtgtgggaattatggaaactacagttcaagatgagatttgggcggggacacaaccaaatcatatcaatacagtactcttaaatttttgaataatggctattttttttttgttttttgaaatggagtctctctctgttgcccaggctggagtgcagtggcacaatgttggctcactgtaacctccgcctcccaggttcacgccattctcctgcctcagcctcccgagtagctgggactacaggcgcccgccaccacacccagctaattttttgtatttttagtagagacagggtttcaccgtgttagtcaggatggtctcgatctcctgacctcgtgatccacctgccttggcctcccaaagtgctgggattacaggtgtgagccaccatgcctggctggaataatggctagtttttaaaaacaggtgatttcacacaaaaatctgttgatggattcatagaacaccctgctccccccactgcccccgccaatacagaagactatcagtactgggcttacgtttgttcttggcaacagtttgttgaagcaatggagccctttagactggaccttttagactgatgatgcttttgagtcaaccaaagtccctgccatttcctgttatcttcccaagtctgaggtcaagtgccatttgccattgtagtgctgtctttcttgggctgtcattactcacctagaagctatagcgatttgagtttgccatctctacaatagtgaagagtatagtgatacccagataccctgaaatgcttagactaggatcatatgtggagtccattacattttaacttttgtggccttgggcacattacttctttgagactcagtttcctcatttataaagtggataatatagcggtaactttctcttaaggagtgtaacacactttactcctatgcaagtgcttttacatattatataataaaagcttagtaaaagttagctgtgattattattacagctactactgccatcatcatcatcacctgtggaatataaaaggtattcctgtatcatgctattatggtagtaaccagaacaatgaagaatctttttactttcaaaataacatttttataattttgttttaaaaagtaaattattgttacctatttttatataaacttgaaaataaataattttatttttagggttctgttagagtctcgtaggaaatctaagaagattacagccagaggaatctttgcaggtgccagagtggtgcgaggagtggactggcagtgggaagatcaagatggaggaaatggacgtaggggaaaggtacagtgtttctctgaattcattatgtattctagagtattatatgttcagaacctttttattactactataaatgaatttcttggtccattgttttccatgccagtaacagtttttaaaatcttgatttcttttttctctggaagtaaaaagattgttcttgctttttgtaagcattgatgttccttagagggtcattaggtaggttttaccttcccaccttcaggtttcatattgtcattttgttacctagcatgcttttctgaacgcatttgggccagtccctccctaagcagtatctcatgtcctcaactttcctgctatttaaatttcatttgaattgacttgttttatattctcttccctcaaagacctgtttctgaggcacagtgggcaattatgctgttatcgagcccacctacctctgttatcctttgcagatagcatagcgggctcagagttttaggagtaggtcaaagcagaatattctgtgtggtgaaatgagagacctcagctgatctaggtggcagggaatgggggtgaagaggagagtgggaatgtcatcattacatagtccaaataagccaagtacacttggagaacgtgagtcaggctcacttgggcagtgtatccacagttgaataaaaacggtacagtggaagtagggataagagctttcaacttgtttggccaccacatattacacggctgcaatctggatgggtcaccttccatgcctggtgcccagcagtcatcctggaagcgccctttgaagccctgtgattaacaaagatgcctttgcctcttttcctggctggatctcatgttttctgtatcccattagatatcttacttagcttactgtctcttttggtaggacacacattctagtaacttcttttgaaagagtatgtgagaagtcaaattttaattgactgtgtatttttcctcatagttaattatatggtcagagggggctggaagtcatctttcctcatcagcttttgaaggcatttgctgtttgaagccacataaatggaacttcctggttttttctgtattggcacttttttgggataaaagaaggcattcttgaggctttgagtcattctgttacatttttggtttgctttgatttaacacatgttgtgttttaagaacaaaatgagggccaggcatggtggctcacgcctgtaatcccagcactttgggaggctgaggcgggtggatcatttgaggtcaggagtttgagactaacctggccaacatggtgagaccctgtctccactaaaaatacaaaaattagccaggcatggtggtacatgcctatagtcccagctaccagggaggctgaggcaggagaatcacttgaacctgggaggcagaggtagcagtgagccaagattgtgccactgcactccaccctgggtgacagagtgagactccatctcaaaacagacaaacgaaaagaacaaaatgaagaaaaagaaatgaaaccatcttgtacatgtgactccaagtgagggaactttataaaataaatctttagagtaacattgttaagcacattgtttaagaccaagtgtaacttctgttgtctgacttttttgttttggcctatgtatgtgaatgaagaaagttaacatccctttttccccttcagtgctggatgctttatcccactcccctgatgtaacccacgttaattgtatgtagtgtattcttcctttttgtttttctaatatatattagagatggagtcttgctgtgttgcccaggctggtctcgaactcctgggttcaagcgatcctcctgcctccacctcccaaagtgctgggattacaggcatgagccaccgcgcccagcctattcttaaagggctttttaagtctcactatacgtgttagtcttttaaagctgtttgttttacaaatatgattaagtatactagatcatatttgtttttttgttaagctctttattatggagtatttcagacatacacttgagtagaaagtatagtataataaattcccatgcactcatacccaacttcaacaattattaacttaaaaaaataccatttatttgttgaagaaaccagattctatttggccaattgattctttatagtattctttaacttctttaacttgttcttttaatctttgtatttcctataaattagttgttagatctagaggcttgattagatagattcaggttcaattttattttggcaaacatacctcatatgtgatgctgtgtattttctattgtatcatataaaggggcacataaagtctgattattctgctattagtgatgttaagattgatgaacaggtgcaaattttgtcagatgtatcctttacagagtttcttggcaacattatacctaatggttttaacagctgttccttacatgtgaaattactgtagttattttcttatgccctccactttgtttcctcctcaataataaatcaagtcatattaacaaatgaaggaatttcatttaatgatttggagcttgactaatgaacttacttctatttcaagtaatttgaaatttaaagtaaatttgatttaaaatttgtctttgttttttagctagccaaatgcttttttactcatcctataaaatacagacttaatatagcatcacattttttaaaacaaatgaagttgaatctgaatatattagaatcagaaggaactttttgctacagattgcatgttttaccttcgagtgctagaaactgttactttagaaggttatgtagtggttagttgagcaggaatcataaagcaaattaaggtaaatggtggactcttaacttcaggatggtagttacctctaatggaaggcaggaggatgggattgatgagatggacataggggacttgaaaagtactggttctattttttttcttaggttgggtaataattacatgggtgttcagtttatttttttattccttaaagtttacatatgctttgggaggctgaggtaggcagatcacaagatcaggagtttgagaccagcctggccaacatggcgaaaccccatctctacttaaaaaaaaaaacgaaaattagccgggcatggtggtgggcacctgtaatcccagctacttgggaggctgaggcaggagaaccacttgaaccggggaggcggaggttgcagtgagccgagatcgtgccattgcactccagcctgggtgacaagagcaaaaaaaaaaatttacatatgctgtattttataatgtgtaatgtatttcaaaatttaaaagagtaaatggactaaattactaacaatttaaaatatgtttcaagtgattcattagatcttaaacataaaacctttttatttccacaaatatatcataaaatacctggcttacaaaactatttagtacaggatgaaaaagaatggtcattatatatcttatttaaagtaatagtttttaagtgtataccttgaaagttatacttcagcctgtcattctaagtaactatgaaggatggctgtgattgtaagtatcaagatggagaagagtaatctgaattgcatgtgtgcagcttcccactctttgctgtagtcaggtttacttgagaaggtccaagtttaatgctgtttgtcatttttgtgtacaggttgaacattccaaataaaaaaatctgaaacctgaaatactccaaaatatgaaacttcttgaacactgacatggtgctcaaaggaaatgctcattggagcatttagaatttcagatttttggatttgggatgctctaagtacagtgcaaatatttcaaaatctgaaaaaatttgaaatctaaaacatttcttgtcctaagcatttcagataagtaaactcaacctgtatgtgattctaggccttaaagcaatggcaaccccagtatatatatatattttttaatccagtgaattcaagaatcagactagttgggtgtggggcttggagatgttgtctgggtttccatggtaggcatgccattttagcttaggtggcctgcaactgcgggatactgttggaggagcaaaagcaactcaagacctacttgaacattgccaccaaggctcttcaagagctttgtgcttgttaatttttagttgaccaaaaaggtttatcttgaatcattttgggtattttacagagattttaaatttcatattgagtaatgggcttaaaagaatatactgttcttgccgggcgtagtggctcacacctgtaatcccagcactttgggaggcctagacgggcagatcacctgaggtcaggagttcgagaccagcctggccaacatggtgaaaccccatctctactaaaactacaaaaattagccaggcgtggtgacaggcacctgtaatctcagctactcaggaggctgaggcaggagaagcttgaacccgggaggcggaggttgcattgagccaggatcgcaccactgcactccagcccgggcgacaagagcgagattccatctcaaaaccaaaaaccaaaaaacaaaaaactgttcttaaaggaatctctttaagaataaaaatattttaaattttctatcaaattctattttctgataatctatcactgtaatccccaagcctcttgatttaaaaatttctacagaggttttagaaattaccttataattctggaaaaatatggctctaatgataatttaactatgttagcagtgacatatttggcaaataagtatttttcatgatcctgttacacaggttgctagatgaaatgatttttaagatttaaatgtaataattaaaagaactaagctcttccctcccctttaaaaaacttcttttctcaaaaactattctgttaggtaacagaaatccaggactggagtgcatcaagcccacatagcgcagcatatgtcctctgggataatggtgctaagaacctttacagagttggctttgagggcatggtaagtagtgaagagccatagcaggtgaaagaaaatgttggatgggtgaatagctcttactgctcttttattatttttcctttgtcatctccctttgtcagaacctttacgtttttactatgtttctctaaactatttaatagtaaatatgatttgcctttagtttaatgtttgagtaccttactatatattggtggtgtagaggtgacccattttcagtgtaagtccagggggtttatttacgaaaatctatcaaaaagattgggaatcatctgtaagaccattccttgacgtggatggacctggaagacggtattataatgaggttttgtgatatatttgtattctgtgctctggtagcttatataaaagtataaattacaacaaatattaaaattattttttaggagattcctctccaccccttggtattttttaaagtatagtgttgataattgaaaatgattgacttagaaacaccttgaattacttaagtgtttagaaaaataatggaggtttattcaatgagttgtcctatgtttttgtatttcatggaccattgttcaagcgctgatcttggctgggcacggtggctcacgcctgtaatcccagcactttgggaggcccaggtgggtggatcacttgaagtcaggagtttgagatcacactggccaacatggtgaaaccctgtctttactaaaatacaaaaattagccgggtttgatggcatgtgcctgtaattccagctatttgggaggctgaggcacgagaatcacctgaaccacgagggtcggggtgcagagctttcaatgagccgagatcacgccattgtactccagcctaggtaatggagtgagactgtatctcaaaaaaagttgatcttgctatttaatgtatagagtataataaataaatgccaaaatattaatgcctttcacatccttttcattttgaatacattccgtattcaaagaattctttacatttcctttttaaaaatcaactgtctatgttcttgttaggaatggaggaagtatcccagtgtccccttaatttatttccatttatttatttattttttatatttatttatttattttttgaggcagagtctcgctgtgtctcccaggctggaatgcagtggcctgaatgaatggagaaagtatcccagtgtccccttaatttatttccattttatttatttatttatttatttatttatttatttattttttgagacacagtctcgctgtgtcgcccaggctggagcacagtggcctgatcttggctcactgctagctccacctcccgggttcatgccattctcctgcctcagccttcctagtagctgggactgtaggcgcccaccaccacgcccggctcattttttgcatttttagtagagacgcgatttcactgtgttagccaggatggtcttgatctcctgacctcgtgatccacctgcctcggcctcccaaagtgctgggattacaggcgcgagccaccacgcctggccttatttatttttagagacagggtcttgctctgtcactcaagctggagtgcagtggtgcaatcatagttcactgaagtcctgaactcctgggctcaaacaaacctcccacctcaacctctggagtagctaggactgtaggcgtgtgccaccatgcccaactaatattaaaaaatttttagtagaaatagggtcttgctatattgtccacactggttttgaactcctgagttccaagcgatcccccaccttggccttccaaaatgctgagactactagcatgagctactacagctgaccaattcatgccacttatatattaaaagccagccatgtgaatttaaacaaatactttagttgccaatttttattattgtatatagcagtgattatcagcttttcattttcttcatgcctctgcctgtttttaaattgtcaattttttaggattccaactgattgttaattttcttcaaatgaagcctgtgtgctatatgtgctcaggtacttaaatgaatggtatttatatagattgatggccgagtatgttgttgtgccattatttatttaatgagatctcttgatgggtacctgggttggattttgtttcccctactgcttcaagcagtgtgtcagtaagcatccttgtgtatatgcctttgtacattatgggtatatttccttaggatagattcctagaagtaaaattgctggggtagggtagtatattaaaacaatttgacagctgggaggggtggcccacacctgtaatcccagcaccatgggaggctaaagcaggtagatcacttgagtccaggagtttgagaccaacctgggcaatgtggcaaaaccacatctctacaaacaataaaaaatgttagctgggtatggtggtttgcacctgtagtcgcagttacttgagaggctgaggtggaagtagaaggatcacttgagccctaggaggtcgaggctgcagtgagccgtgatcgtgcactccagcctgggcaacagagagagaccctgtctcaaaaaaaaaaaaaaaaaatcccaaaaaaccaatttgacacctatgtctctttggccaggattcaatgacagtaaaagatgctataaaagagttgggtactgtgtgagtgtgcgtgtgtgtgcacatgcatgtgcatacctgcaggtgcacatgtgcatctgtattagaggagctcctttccttgatagggtaagatgttctaatcatctactatatacacctgtactattaggcacttttaagtaaatccacatctaaattttcacagtatacacaaggttcttcctctaagcccacattttctgtacttttaattataccacagctacctcccccattcagatacttagtaatttgtttccttgtaaaagataagtgggaaggaatgttagttaaccaggttatggcgaagtaaggactaaagttgatgtaaggccgggtgcagtggctcacgcttgtaatcccagcactttgggaggctgaagtgggcaggtcacttgaggtcaggcgttcgagaccagcctggccagcatggtgaaacctcgtaaaaatacaaatattagttgggtgtggtggcatatgcctgtattcccagctactggggaggcagaggcaggagaattgcttgaacccaggaggtggaggttgcagtgagccgagatcccgccactgcactccagcctgggtgacagagcgagactccatctcaaaaaaaaaaaattgatgtaaataggaaaattagctggacaaggaatcaaaagactgtatttggttttgttattttttactttgtattggctattagttttgaataatttccaggttttggtttgtttttggtaaaagtatctttaaaatggaatgtgctggcccggcgtggtggcttatgccagtaatcccagcactttgggaggctgaggtgggtggattacttgaaaccaggagtttgagaccagcctggccaaagtggtgaaaccctgtctgtactaaaaatgcaaaaattagccaggcgtggtggtgcatgcctgtaatacccagttgctcaggtgactgaggcatgagaatcgcttgaacccaggaggcggaggttgcagtgagtcactttactccagcctgggcaacagagcaagactctgtcacacacacacaaaaaagaatgtgctgtgcacatttccaataatagatatttgttgtccttttttaacatgtgtttttcaaactattataattatttattaattataagcattttagtctaatgtaataagattcagacattttattttatttatttattttttgagacagagtctccttgctctgttgcccgggctggagtgcagtggcgtgacctcagctcactgcaacctctgcctcccgggttcaagcgattctcctgcctccacctcctgagcatctgggattacaggtgtccagcagcacacatggctaattttttttgtatttttagtggagacggggtttcaccatgttggccaggctggttttgaactcctgacctcaagtgatccgcccatcttggcctcccaaagtcctaggattacaggcgtgagccaacgtgtacagccagattcagacattctaattttgagctttaaaagaatgctgaaagtaaataaaatatgacctatctgaagatcaggtttctagtttttacaagtacttttgaaagcagtgtttagtgtgattgttgacctagactgttcttgatttctgttttgggtatgttctgaatgaatattcttgcctgtttcagatactgagccatatttgaagtttcatgggtgatttttctggtttcttttcttcttagtctgatctgaaatgtgtccaggatgccaagggaggttctttctacagagatcactgccctgtgctaggtgagtgagaagattagagagtattactaaataatgggtcagagttcgtggaatcagtaaaatgcttaaattggatgttagaaaagttaattaccactaaagttacttagagaaaaaattttttggctttcctttggtcttaaagtattttttcttttattatgctttatttggactcagagttgtcatgtcttgagaattcattggccatttatgtcataatatacatttgaaacttttatgttttaactgcaaattatattgttgaaaaattttgcattagattacaacaattgtatgttatacactattgagaataggatttgacacttttgtgcttaaaaattccttagaatttttgtcaaattgtcttcctaagtacagctccaagattaagataatatatgtaatttcatgtatcattaaaataaaaaaaagggaacaagaaaaccaaaactaccttcattttgtagatttattgttgcctggatgaacatttaccacactctcctgatctttattctctgaatggttttctttctcatgtgaactgtgtttctccttccaaatcatttgacttgcctttgtcgcaaaaagtgctgttttttttgcagtataccttaatttttttttaaaaaaggagaatgcataaaaaaatttacattttttaatgagctcatctatcttgctttcacaaaacaagctttcttgttttgtgttttgctttcataagaaaaatgcaaaatcaacatgcatattttggatctcagtatagtgtttcatgatcatgaattcatctcagaactagcttttgaaaataatctagggaataagctttgacatattttaaaaagctctttagggcaagaatcacaggaaccatttgttaaaataagatagtactaagcacttaatggaaaaaataattccagggctttcattcatattctctagttagttattgtggttctaatgcagtgatagtaagttatccaggcataaaagtgagtattttcaacacctggaactttgtgttctgatacaaggttgaatagtcttttatagactctacttttactcagtctttgttataactcatattatttcaatttttgagtctgtttggcttttttctttttttaaaaaaagctttctagttctaaaattttatacttatagggaattctcaagaccttttaaaactagatggtacctgaaactaaaatatctacatgttatttaaagataatgcagctgcctgttgttgtgaggtttttttctccctttattcaattgcctctgaaattacaggtgagcagaatggcaacaggaatcctggtggattgcagattggtgacctggtaaatatagatctcgacctcgaaattgtacagtctttgcagcatggtcatggaggatggactgatggaatgtttgagactttaactacaactggaactgtttgtggcattgatgaagatcatgacattgtagtacagtatccaagtggcaataggtgggtgatatctctcaatttttgacaatgacaaataaaactaatatagagaaaagtcttagagaaagcaaataaagtgatacaaccaaatactcattaaagctagcttttagatggtaagtaaaaatccagaatatatattggtaaggtggagagaaacaaatgataagaattacgtgtgtgtgtgtgtgtgtgtgtgtgtgtgtcttgtgtgtgtatgtgaatttatatgaggatgtttatgatacagtgttctgtacactatttttccttcaagaggagaatacattatatcactattaggtctgaatacagcttaaaagttctgtgttcgtattggactatatcagtctaccctgaataggaagggttttacattaaaactcctttggtgcatatctccagggtcatctcttattttttgtttttattgatacacaagaggtgtacatattttgggatacatgtgatattttcatccatgcatacaatgtataatgatcaaacaggcaattggggcaaccatcagtattaacatcaccccttctttacattgggaacattccagttcctctccccagctgttctgaactatacaagttgttaactatagtcgcccaactgtactatcaaacattagatttttttccccgtatctagctgtagtcttgtacgcatttaccatctcactcatccccccctttctcctactgttcccagcctctggtaaccaccaatcaactttctatctccatgagatccacattttacatctcctcatatgagtgagaacatgtggtatttgtctttctgtgtctggcttatttcacttaacataatgacctccagttccattcatgttgctgcagatgacaggatttcattctttttatagctgagtaatactcctttgggtatatgtacctcctgttctattctatttttagagaaggggtctcattgtattgcccatgcaggtcctgaactcctggtctcaagtgatgtttctcccctggcctcccaaagtgttgggattacaggaatgagccaccatacccggcccacattttctttatcctttcaatctatttatgaacacttaggttgatttcatgtcttggctattgtggatagtgctgcagtaaacatgggagtacaaatctctctttgacatactgatattctttcttctgggtatatatacacccagcaatgggattactggatcatatggtagttctgtttttagttttttgaggaacctccatactgtttctcatagtggctgtactaatttaaagtcccaccaacagtctacaggtgttccccttttcgtgtgttcttgtcagcatccgaaaagccattttctttttttctctttttaaaaatttaaattaaaaactttttttatagtagagatagggtcttgccatattgcccaggctggcgctgaacccctggcctcaagtgatcctcccactttgacctcccaaagtgctgggggcttgagccacctcgactggccagtaaaagcaacagtagtttgagaggattgatatttgttctttaaatgtttggtagaatctggcattgaaaccatcaggccctggggcttttctctgatgggagatatttttattacttctttgatcttgttactcattattggtctgttcaagttatatatatatatatatatatatatatatatatatatatatatatatataaaattattattattattttttgagatggggtctccctctgtcacccaggctggagtggcacgatgtcagctcattgcaacctccgtctcccaggttcaaatgattctcttgcctcagcctcccaagtagctgggattatgggcatgtgccaccacacccagctaaattttgtattttttaatagagatggggtttcaccatgttggccaggctgatcttgaacccctgacctcaagtgatccgcccaccttggcctcccaaagtgctgagattacaggtgagccaccgcccctggccagggttgatacttcttcatgtctcaatcttggtaggttgtttatgtccaataatttatctatttcttctagatttttcaatttgttggtatatagatgttcatgatattctgtcatgatcctttacatttctgtggtatcatttatgtccccatttttgtttctgattttatttgggtcttctggttttatcttagttggtctacctaaagatttgttgattttgtttatcttttgaaaaatccagcttttcattttgttgatattttctctttttattgtctcaatttcatttatttctgctgatctttattacttcttccttctactattggatttgctttgtttttgcttttctagttccttgagctgtattgttaggttatttgaaatcttcctactttttaaattattattattatttttttgagacgaagtttcgctcttgttgcccaggctggagtgcaatggcgcgatctcagctcactgcaacctctgccttctgggttcaaacggttctcctgcctcagccttcccgagtagctgggattacagtcatgtgccaccacgcccagctaattttgtatttttagtagagatggggtttctccatgttggtcaggctggtcttgaactcctgacctcccgtgatccgcccaccttggcctcccaaagtactgggattataggcatgaaccactgcatctggcgttaaattattgatcaggtgtttattgctatagatatccctcttactactgctttttctgtatttcatggattttgatatgttgtgtttccattttcatttgtttcaagaaattttaaaatttccttcttaatttctttattgacgctttcattgttcaggataatgtttaatttctttctagtgttattgcattgtggtcagaaaagatactttataccatttcaacttttttgaatttagtgagacttgttttgtggcccaatatgtggtctcttttggagaatgttcctcgtgctgatgagaacagtgtgtattctatggcagttggatgaagtattctgtaagtgtcaattatgtatatttggtttggattgtagtttaactttgatgtttctttgttgattttctctctagttgatgatctgttcattactgaaagttaaatgttgaaatgtcccctactgttaaagatattgcagtgtatctttccctttagatctattgatgtttgtgttttatatttggttgctccagtgttgagtgcatatataattgttatatccttttgctgaattgaccactttattattatacagtgacttttgtctgtttttacagtctttaacttaaagtctattttatctgatataaaagtataattattcctgctcttttttggtttccatttgtgtgcaatatctttttccatcccttcactttcagtctgcatgtgtctttataggtgaaatgaatttcttgtagggagcacagggttgggtcatttaaacaattttcttttacccattcagccactctatgcctttttttttttttcttgagatggaatcttactctgtcgcccaggctggagtgcagtgggacgatattggctcactgcaacctccgcctcccgggttcaagcaattctcctgtctcagccttccgagtagctgggactacaggtgccctccaccaagcccagctaatttttgtatttttagtagagatggggtttcaccatattagtcaggctggtctctaactcctgacctcaggtggtcctcccgcctcagcctcccaaagtactgggattacaggtgtgagccgctgtgcccggcctcactctatgtcttctagttggagaattagttcatttacattcattgttgttattgataggtaaagatttactactgctatttttgttacttgttatttggttgttttgtaactcgtctcttccttttttttttcttgccctcttcctttgtggttaggtgattttctttggtagtacgttttaatgtgttttttaaataaattttatcattttttgtttttgagacaaggtctcactctgtcattcaggctgtagtgcagtgacatgatcatggctcactgaagccttgaactcctggcttcaagcagtccttccactttagccttccaagtggctggaactacaggtgcacaccaccatggtcattaaaaattttttttgtagagatggggtcttacgatgttgcccaggctggtcttgaactctttgcctcaggcaatcctcctgcctcaccctcccacaatattggggttacaggtgtgagccactgcacccagcctgtgttgctttttttttttttttttgatacggagtctcgctatgtcaccaggctggagtgcagtggtgtgatctcggctcactgtgacctccgactccctggttcagacaattctcctgcctcagcctcccgcgtagctgggactacaggcgcgtgccaccacacccagctagtttttgtatttttagtagagagggggtttcaccatgttggccaggctggtctggatctcctgacctcgtaatccgccctcctcggcctcccaaagtgctgggattacaggtgtgagccaccgcgcccagccctgtgttgcttattttcagtttatctactatacgttttttcttcttggttaccatgaagcttacaaaaaacatcttatatgtggacggcaagccacctagttgccaaggcaagagaccgagggcacaagctgttccagtataataaagaaaatatatagaataagaatagttataatagttatactagaaatggagtatagatttgattatatatgaatattattaatcattaatttgtagcattactctttattccagtattgtaataatctttgttctacaattgtaacctaggaaagaccaggctatacagatataggagctgaagggacatggtgagaagtgaccagaagagaagagtgtgagccctctgtcacgcccagacagggccactagagggctcgttggtctagtggtaacgccagtgcctgggaaggcacctgttacttagcagaccgggaaagggagtctccctttccccggaggagttagagaagactctgctccaccacctcttgtggaagatctgacatcagccaggcccgcccgcagccatccggaggcctaaacctctccccgtgatggtgtgcttcagtggtcacgttcctggtccactttcatgtttcgccctgtacacctggctccgtcttctagatagcagtagtagaattagtgaaagtattaaagctgttgatctctccgaaaaatgcgtagaagaaataatgatgtaagctgtcctctctctctttctgcctcggctaccaaaatagggaagggctccctgtctggtggacacatgactcgtgtgacccggtggacatgtgacttgtgtgaccttacctatcattggagacgactcacactccttaccctgcccccttgccttgtatacaataaataacagcgtggccaggcatttggggccgctaccggtctccgcgtcttggtggtagtggtaccccaagcccagctgtcttttcttctatctctctgtcttgtgtttttatttctatgatctctcgtctccgcccacgaagaaaaaaacccacaggcccagtagggctggaccctatattatagatataacaagttattttaaacaggtgacgtcttaactttgattacaaagaaaatcaaacaaaggaaaactaaaagactctacactttttaactcctccacattgtgacttgttgtctctgtgtacatcttttgatattgcctatctcttaactgtttgccgtagttatttttttgataagtttgtcttttagtcttatgctagagttatgaggtgattacacgtaattgtagtattaagagtattctgaatctgtctgtgtaattacttttaccagggaattttgtatcttcacatgttttctttctgcatattactatccttttcttttagattgatgaactccctttactatttcttataagaaatgatggtgatgaatttcctcagcttttgttcatctgggaaaggttttatctcccctccatgtttgaaggaaagttttggttggtacagtattcttaattaccagtttttttcttttagcattttgaatatgtcatcttgctctctcctgtcctgtatggtttctgctgaaaggtctgttgctagatgaattggtgctcttttatgtgttatttccttctcttctattgcttatttttggatccttactttgtctttgacctttgagagtttgattagtatatgtcttggggtagtctatttgtttttctgttttttttttgagacagagtctctctctgtcacccaggctggagtgcagtggcacgatctcggctcactgcaagctccgcctcctgggttcacaccattctcctgcctcagcctcccgagtagctgggactacaggcgcctgccacgacacctggctaatttttttgtatttttagtagagacgaggtttcaccatgttagcgaagatggtctcaatctcctgaccttgtgatccgcccgcctcggcctcccaaagtgctgggattacaggcgtgagccgctgcgcccagctctatttggttattatttggatttaatttgtttggtgatttctgaccttgctgtacattgatatttatttttttatagtttttgcttttatctttctctagatttggaaagttttctgttgtaatttgaataagcttcttaccccttgctctttctcaactctctcttgaatgccattgactcagttttgcttttttgaagttagtctctatatcttgtaggccttctccattccttttcattcttttttctcttctgtgtattttcaaatagcttatatccagtcccactgtttttatttttttccactgcttaattttgctgttgagagcctctgatgcatttttcatttcaacagatacatttctcagttctaggatttttgtttgattttgaaaacatcatttccatctctgttaaatttctctgataaattcctgaattggttttctgtgttatcttagagttcaactgagtttctttagaactgctattttgaattctttaactgagagcttacatattgctgccttattagggttggtcattggcactttgctttgtccattggcttcctgtttattttcttatctgccttatatggcttcgtattgaaagatcattttttttttttttcccagtttttgctgtctgcttattttggtctttctagggcatacttgcttagaagttctttgcaattgcctgttgaatcccctaaattatagattgctgcctgcctccttttcagagctaaatggtgccttaagcccaagtttgccttgggtgtcacaaatgtttggaactctgttcatcctgaattgggcgggaaggagtgggggtggatcccaaaagtggtaccttggctatgtgggaagtctggttagggatttatggccagaagacccatggaatgtgtgcctcctgcagtatagtgctgctgaacagccactctgatttgatgtctctcttggctaagataaagagcagagtttcaagggctaggtttgctagtcctgtctcttctctttgactgtagctacccttagggatttttcttcctgcaggtactcataaggcttcctgtggattgaggcaggaatgattttcctgcaagggaacccaagttggtaggaagctggctctctgccttgatctcactttttccagtgtagagactgtgattcctgggggaattttctgtgctttgtgcctggtagatagggggaaggatgttgcagatacagaaattcgtttcttttattatctgcttggcgtttttcatgtctctggccccagggatcatttcagcttcagacttgagttctgggatattgctggtgataatcttggtgctgggtattttttttttttttttcgattttctgttggggagagtgaagccagattgtttctactctgagattttggcgttgccacagatatgtacacatatactaatccttatcagcggtataaaattgtatgcacttcctcacttatgtaccttttaacatactactccctttaagtaaaatgcctgctcctctttttctcccttgttacctggattaattcctctacatcctataaatactgagtttatatgatttgcgaacctcctctctccttttactctccatagtattatatatgcatatactcttcatctatttaggtttactcttacctattaaaattcatttgatttctagattgcaagtttcttggaggctagggatgtctttttaattttatttgggccaaaacatatctaatccactttagtatgtttatagtattttaaagaaaaatcaataaattgaataattgtcttactgacatgtacataaagaaactaattccctgaggttctttggggaagtgatattatatagaataagaaaagttaacattaagttgcttacctaggtatagcattaggcctgattgtattcaaatcttacgagcatacatgatcatatcagtagatgcagaaaaagtacttgacaaaatccaacaccctttcgtgataaaaacactaaacaaactgggaccagaagggaacttctttggcttgataaaggacatctatgaaaaaccacagctaacatcatccttaatgatgaaagactgaatacttacccggtaacatcagaaacaagacaagaatgtccactttattacttctgttcaacattataccagaggttctagtcatagcaactaggtaagaaaaagaaataaaaggaagaagtaaaagaaaaagaagatgtgaaactaactttgcttacagatgacctgataccatgtatagaaaaacccaaagaatccacaaaagctattgtagctaataaatgagttcagcaagattgcaggaaccaagattgatataggaacatcagttgtctttctgtacactaacaatgaacaatatgaaaatgaaattaaaacaatttcatttataatggcatcaaaaagagtaaaatacttaagaataaatttaaccaaggagatgcaagacttgtacagtgaaaactactgaacattgttgaaagaaattaaagaagacctaaataaatgacaaaacattccatgttcttagatcaggtttaatattgtttagatggtatattagtttcctagggctgctataacaaattaccatagactgggtggcttaacagagatttattctttcacagtatcagaggctagaagtccagagtctgggtgttggcaagattggtttgttctggagactttcagggagaatctgttgtatgcctttctcccagcttctggtggttcccagcaatctttgttccttggcttgtagatgcatcactctatattctctgccactgtcttcacatgacctttttccctgtgagtctgtgtttcttggtgggtgtcggtacatgactctcttataaggacactaaacattgaatttagggcctaccctaatccagtatgacctcactttaacttgattacatatgtaaagtccctgtttacaaataaggtaacattaacagatacctggattaggacttcagcatattttggaagggggcataattcaacccacaatagatggcagtatttcccaaactaatcttccgattaagtgtaatccctatcaaaatcctggtacttttttttgcagaaattgacacactgatattaaaattcctgacccgaggtcaggagttcgagaacaggctggccaacgtagcgaaaccctgcctctactaaaaatacaaaaattagctgagcgttgtggtgcatgcctgtaatcccagctacttgggagactgaggcaggagaattgcttgaacctgggtaacagagtgagactctgtatcaaaaaaagaaaaaataaagcaaacaaagaacagtttacttgtgtggttacagaaagttagtaaacaggcttttatatgctaataaccatttggactaaggagaagaggatataatatgccaatattgtagaaacttacttgacaagggaacctttactcttggagttcagtgtggaattagggtaggtgttctgttatcaattgtggtacatctatttgatggaatattaagtagtcattaaaacgattattttgaagatgatagcagcgtggaaaatgcctgtataaagacatcagcattcaaattagtttgctacaatgattacaattatggtaaatatccatgcatggaaaattaaaactagataatatttttatccattaaattggcaatggtgtggggaaatggtacactcattgtacagcagtttggctctattggaattgtaaacaaatgtatgctttgatcagatagttcttttaagaatctctactgaaataccgacctcatgtgcacaaagatgtatacgcaggaatggtctttacagtactgtacatattggtgacaatttggaagcactttaaatgctagtcaataggagaatagttaagtacattagtgtatatccaagtgatggaatactctgtagcagttaaattgaattaaggtctattcaatttaggtctgtattcttagacctatttaagataggtctgtatctgtgacactaaaaaataaatcttccaagatgcattctttgaaaaaaaagtcacaaaatatatgtatgtgtccctatgtctgcgtatacatatatatgtatataatattcccatttatggaaaacaactagattatgaatgtcattcagtgtattgatagaatgtctgtaaggacacagagtagaatattaatagtggtttctagtgggatgggaatggtgatccagcgtgtttgtgtgaaatggaacttttactttacatgtttctgaaatgtttgaatttttaacaataattgtatattacttttataacagttttgaaaacatgcaggggagaatagacaaacgtataccaaagtatttacacttgtattaaggtggtaagattatggatgactctttccccaaatttgtatattaaaattataaaaaggaggtgctggggcggtggttcacacctgtaatcccagcactttgggaggctgaggcaggcagatcacttgagctcaggagttcgagaccagccaggctaacatggtgaaatcctgtctctactaaaaatacaaaaattagctgggcacagtggcatgcgcctgtaatcccagctacttgggaggctgaggcaggagaatcatgcagtgagccgagatcatgccactgcactccagcctgggtgacagagcaagactctgtctaaaaaaaaaaaaaacaaaacagaaaacaaacaatgtatcaatatatatgtatttgtgtatatataaataaacacaaatcattcaggatataattgcaaaggattgccttactcttttgatcttcactgtttaagaattttgtattaaaattaagcaaagctacccattttgaggtttagctttgctcttgtaggtggaccttcaatcctgctgttctcactaaagcgaacattgtccgaagtggagatgctgctcagggtgcagaaggaggcacctcgcagtttcaagtgggtgatcttgtacaagtttgttatgacctggaacgaattaaacttctacaaagaggacatggagaatgggctgaagcgatgcttccagtaagtatgtttagaataattctgggctagaaattacaatatacttatgtcatttttaaaagtaaattaatgtagaaattaaattggcataaaacttcttagaattgtactctccatttgcacctagacatactcgtgcattttgttttctaatttatcccagttaaattagcctgggaagatccagaaaaggttacagttaatatttaatattttttgatagagtggttattggagaatgttgtgtggtgcaagtcagcagtggtttttctgatacttaaccccagaatgatataggtctatgcccatctggtctctagcagtgctggaccagtgcagctttcctgatgtgggggcctgcctctttaaaacttgagtatgaaagagcagctcagaaatgtgtgtgctttcatagagtgaatttgttcccaaagagctacagttttttatttagtcattttttcgtcaaatgttcatcaacaacaaacaaatttgcttgttctgccctctcttcaaccatccttccctttccctgtctgtatcccttgcttctgtccttctgtccctgcctttggtattactctgtcaccttgccatcccttatgcttccttcttctgtttcccttcctcctccaccttgctgtgtcctcctctgtagttctccaccttgcgtactcccatctcctgtctcatccagcctctcagttcctgtcctgcctgtccctccattccagtcccattcagtgcctccatcctgtcccatgtacttcatctcacatccctcttagtatcctattacccccactctactgtaattgttcggtctcttctcctggccagcacctccttctcttcccatccagccccaactcctgccccatctcatcccctcccatcctgcctagtccctccttcctgttgtcctgaccctccattagcccttctgtcctttctgccttattccctaagtaggtattttagcacatataatatgcctattaggcagggctacaatagtgaacaatacagaaaaaatagtgaataattgtgaacaaaacaaaaaaataaaatctctgttgttatgatgcttttattcaaagacacttcacagtttgtagctgccgtacacatatacatacaatattacaagagggtgatgttatagcatccttattttaaagatgaggaaatcagaggtgcgattctgaactggattttgaacgcagacctgtcttatttcaaaacctaagcagtctttctgccatttcaaactgctatatagataaaacctctagagaattctaaagggaaattctgggattccagtagtggtgttacagattttgtgtcttatcaaatcctttttgataaaaatagacaattagattagcataaccaaaaaagccacaaacatctataacaaaactaggtttcagagtaacctgttgaaccctaaatatgaatgagtagagataaaccactgacagctattgagtctgcatctcttcgtatgggagcagagagaattaatgaggcatctgatagatccgagaacaggaaagctccaaaacagctagcaaatattcattggctagtgtggtagacaattgtcttagcagcacctgaacctgagagagttcctgaagactccagtttgggatgagaaaataggtccatgctaaagtcagaaaggatggaactagtgtgggcctttaaactcaaaactaaccagccaaagctcccttccaaggcagagcctcactttgaggagaaagtgctgggaatagaaacaaaatttagtaggacggagacagtagggacaaaggaaggagaaggtccagataaaatttagaagggatcatggttaaattcccatacacagttattattgaaaaaagggaataaggaatagaacttctctacagatagtgaaagtatatcaggccagacgtggtggctcatgtctgtaatcccagtgctttgggaggccaagatgggtggattgcttgagccaaggagttgagaccagcctgaacaacgtggtgaaactctgtttctactaaaaatacaaaaattagccaggtgtggtggtgtgtgcctgtaatcccaggtacttgggagactgaagtgagaggatctcttgagcccaggaggttgaggctacagtgagcagagatcacacttattgcactccagcctgggcaacagagtgagaccctgtctcaaaaaaaaaaaaaaaaaaaaaaaaaaaaaaaggcatatcagaaagatacgtgcagaaaaatgatgaaaactgtacttttataatttaaaatgagctaaaaggctgggcacagtagtgtgtacctgtagtcccagctactcaggaggctgaggcaggaggatcacttgacttcaagagctctgggtgtagtgtggatgtctgcactaagttcggcaaggatgtgacctcctgggtgaaccccaggttgcctgtggcgtggggaactggcccaaaatcaaaaacagagcaggtcaaaactctcgtgctgatcagtaatgggatcatgcctgtgaatagccactgcactttagcctgggctaatgtagtgagactgactcttaaaaaaaattgcaaaaaaacgaaaaatgagctaaaagaaattaagaaaatgaaaaaagtgtaagagaatgaaatcagaaattaggtgatataacttaggacataattaaaaagaagtgaaaaagtcattttataagtgaagactaagctggaaggaacacagagcagagcaaataaatgcaagagataatggctaagagaaatagaaggtgaaaaagcaggaaaattttaaaaataggaaaggtgaaaagtatttcagagaaagaagtaaacattaaatagcctctctctctctctctctctctctctctctacaagagagtccttgtagaaaggaaaactaaacccaaataaatgaaatgaaacaaatatgaaaatttgtaattttagaaaaattttcctggaattaagaaaacaatttgaaactaaattttgaaggggcacattgcatacctgggaaaactgacccagaacagcaaacactgggctatattctggtaaaataactgaatcttcaagatgagagaaagtatccaggaaaaaagaccagacaggttattggtgctaaaggaaagaaaattattttgctgttaagaaaaaagtctcatctcagtgttttatgccagaaaacagtgagatcgcatttaagatactcaaggaaagaatataagctgaagattttatatgtaaccaaactaactttcaagtataactgtgctatgaatatgtgagaattcttgttcccatgagtcctttctaagtaatttgctagataatgagtttcagacaaccaaaacgactgtagagacatcaagtgaaggactagtgatcatggaatatgtattgatttgttaaactaagattaaatgaatgttgtaaaggaaagggtagaatatataacaattatatgttctaacaatgtaaattttagttgtaaaaaatggggtggaaattgagcacatgaaaagtttaatatgctgtttgccttttagttgtattaactgggactaaatattattattttagatcaaaatattaggaaagagtaaggacacatgaatgactaatttcagtattgcacatattagggaaccaagtcgagattttatatatatataaatatatatgtatatatataatatataaatatatattatatataatatataaatatataatatatataatatataaataatacataatatataaatatatatttatatttatttttatatatacacacacatatatataatatataattattaggacaatacaaactatattaaagcagacaatgtaatgataaactatgaagttacaaataagcgttacctatataaaaagggaataggatgatataaggggcaaagaaggaagggagacctctttgaatatgtcttgttttatagatttgatttgaaatcacatacatatttaatacaattgtaaaacgaagttaaatttaaaaaggaaactcctcaaagtggaaaatgaaatgaaataaatgaaactaagtgtgtttctgttagcataaccatgtagagagaaaattccaagtaattttttaaacacagttaatttttctttatatcttcataggaagaatagaccctaaagaactgcatggaaattaaatgtttaacacttttcagaaatcttattgcatgtagtagcgttgatattgttattccgagattgttagatgtaccaaaaaacaaatgagtacttgtgtgataattctgttactcctttgactttgagaatcagaattatcagagttgtaaaaggagatgcagatataatatagaggaggtgaagtaaaaaccctgtagtcttgaatttgaatgaaaagagtgtttgaatgtatgatttatgcttctttaaaaacaaaacaaatgtcttcttttgagaagtgtatgttcatatcttttgcccactttttgatggggtcgtttgtttttttcttgtaaatttgtttaagttccttgtagattctggatattagacctttgtcagatgggtagattgcaaaaattttcttccagccataaaaaaagaatgagatcatgtcctttgcagggacatggatgaagctggaagccatcatccttagcaaacaaacacagaacagaaaaccaaacaccacatgttctcactcataagtgggagttgagcaatgagaacatgtggacacagggaggggaacatcacatactggggcctgtcagggtggggggcaaggggagggagagcattaggacaaatatctaatataatgcatgcggggcctaaaacctagatgatgggttgataggtgcagcagaccaccatggcacatgtatagctatgtaacaaacctgcactttctgcacatgtatcccagaacttaaagtaaaattaaaacaaaacaaaaaaatgtcccaaacaaaagctcctatttcctagctgtattcatgaaaatgcctccactgtgaccattttagtaataaccaaacttagtgcccaggttatggttttcaagcagcctttctcaataaagagccaaggctttttggagaaatggctaattctgactctttgacaagaggtgaacaaaatgagcctcgtaccaggtaacaaggaagctgtcactggtttctaggaccatgttaaaaggacctaggagccaacttgaaggggttcttgctgactatatacagagggctgacgagttattaaaactacaccaattagtaaaattcaaatggtaagaaactttgtaagataaagaactgttttttcaacaaataatttgcaaagaaaaacatgtacttgtggactttatgtggatcttgatttaaacaaacaaaaaattgattatgtggatcttgatttaaacaaacaaaaaattgataatttatgaggtaattggaagtttgaacactggaattttgtgatatgtaactattgtaactttgggtgagttgataataaatagcattgtagaatatgttatcaaaaaaagagttcttattgtttggaggtacatactgaaataatactggaggagagaatgggtaggggaataaaggaaacaagattagccatgagctgataattgttacaaatggttgatgggtacatgaggattcagtatgctgttgtctacttttgtatctcttggaaattttccataataaaaagttgaggggaaaaaacaaagaatgtagcctcatagagtttgagatgataatggaaaattccaagtgaaaatgtctaataggctgttaaaaaattagaattagtatgtgtatgtgggggtgagcggtaattttgtgttttcaaaaaaaaggtgatagttgtcaaagtgggttgaattttcaacgaagaagagtgaaaacctatggaataaaattttgggaaaatgaacaggtttaggaatatgaggaagggaaggaaaggaactggcagaaatcagatgattccaaaaagggtttaaacatagatgtaagcttgagcccttcttggccaaattagtttatttttttattttttgttttttttagaaatccaattttctttttcaggctatattgatgatagattttagactacttgagttgcaagttctcaaaatgtaccttacagatttcagaagtaaggattgaacatcaaaatagatgtttatgaactcgtatgaataggatagactttatcatgatttgtctcatattcttgtggaagtagttttattattattttaaaagatattttttaacatttgtacttattcaaataacccatttcagtatggttatcctttgaaagttttttcattagtaataagtaaaatcattactttaagcatataaaaactagtgattgactttatggtatatactttagacttggaaacatgaatctatttttttccccaagactttaggtaaagttggccgagtacaacagatttattcagacagtgatttaaaggtggaagtttgtggaacatcttggacatacaatccagcagcagtttccaaggtggcatctgcaggatcagccattagcaatgcatctggtggtatgttttatattgtgtttctttaagagtaatgtggtttacattaaaacctttgctaattccccagttctcatatacagataatgttgtacatgtgcttggctttgtcccagattacacagccttacttgaatgttgaccaccttttaaactttcactaaaaatttttgttttttataatgtgttgaacaacctttattctggctgaagtactccctggagaagttccataaaatgtgtgctttttcttgggcatatcaggggattttccacatcaaatttgagattcctaaaattcagaattctactctttagtcagaacttttgttttctgccaaagaaccatcactttcttagacttctttattttttctgtatttccaacattattgctagcagatggctttccttcctgtatatttttacatatcagttattttttctcttaccatttaatgagttgttatacatgctaccgtgactagaaactatgctaaaatgtgaacatcctggatgcttgagttgactctttcacatagtctttctttcctgtgctccagctttgtatacacagactcagttcattttacaacataatacaagttactgtgtgtacatgttgtcatccagaaaaggagatagaactataactataaatagtaagaaacaaaaggaaaacataaagtgacttccaattttatttttgtcctgctttctgcttcctctgcctttttgtttattctttcctgctgtaatttgctagtatgcttaacatttaaatccagtgtttatttttaccttgaggttaaatgacaccatagtaggttgactacatacaaagtaaaagagtgaaggacagttaatagcctactctcaaattatgtggacttggcccactttgtcatttgtcccttgccctattttgtgatttctctgctttataataagtaccccaagaattaaggagttagagctttgtagcttctgtattgattgatactatttagaaaaaaatatcttatgaaagggtttaggtatattcatccctggttcattgttgtttttgtcaaaaccaatcatttggcacttactgaaagttattagcacttagatgtccagtttcaacctaaagaaaattggtttgaccctaaactatgtccccagatattacagagattgttgcttttgatcataaccattaatctgttgaattattttaaagtctgtagtattgagctctgagagtcactgtagtgtccttaaaacctgaaaggaagtttgtatcattgtggtactcccatggtagtgtgtttattcataaacttcttatgatgacttttaaatcttgaattattattagtatataatgcactactttttctaaaattataatttgatatacatgaattggagaaaacttggaatacttaagggcttgcatttaatacagctttttatagtagtgattataacttgcatgggtagaaaaataacattaatgatggaaagaataaaataggaaaagattatagaaatattgggtaatacttgtttcttagtagttaaggtttgagatcctcctatattagcagctttatttgatgctttacagaaagactctcacaactcctgaagaaattatttgaaacccaagaatctggtgacctcaatgaagaattagttaaggctgctgccaatggagatgttgctaaagtggaagatttgcttaaaagaccagatgtggatgtgagcattttaaaaattattttgaagcatacaaaaagtagaatagtataatgaaccttatcctcaacaattactaagattttgccagatgtgcttcatttatttcttctttcttgtttttgtgaagtattttaaagcagacatcagacattcttcagtgtgcatttctaaaaaaaccagacatttttgtatttaacattatgaccttttttatgatttacacacttacattttggtttttaaagactagtatccttttgggaaattcagcgattttttttttcctcatgtaaacatcattttatgacatcttctaagtatattttagtgaattttataagcaattttctttttatttttaatttttgtgagtacatagcagatgtgtatataagcaattttcaatccttcttttcaaaatatttaatgtaactcctctccaccccagtgatagttgactatttcacaatttataaggcagatgaattaaaggccatatattttataactcttcctaggttatgttgtgtttttgccattcattcaagctatcttttaagtgggcagttttgattctagtcattgtgctttggctttggcattgataccttgctggcaccagtattacgttcggtgtcagccaagaagttgtagttggagtgacaatttgaatcattctcactgtgttgtaagggtttttgttgccatacctttctttggatgtttgtttgtttttaagtatgctagacagtttgaagatgagatctataattgtaaagtattaatgtcttatttctcctataagctcgacatgttagctttattatagagaaatcaattgtagcaatacagcacagcaatttgttgattggttatgagctatgtaaaaataatttgcttcaaatgttgaagtaccaagtattttttgtgtttgaaagatagtcggatttcctttgtattccagtcaagcagatttaggttttactgtacttaagttttttcttcatttacttactaaattattttaaaattattttttaagaacattatagtactaaaaatttaaaggaaaatacagttctataagatttgttatgaaaaataacatctcctctttctcacccctattttcctgttctacagaggcagctattcttagctggctgatagccttcatatttacctctacattttccagtaacataccagtatacctctgttataatgtcttaattttctttcttcctttcctttaccttttcctttcctggatcttttgatacctcacagtggaaggtgaggatttagctttatttcaccacttccatcccatgcccacaagacacacacatactgtttctagcttcatcatgtagttatattgtaattttgtttggattaaaattagttgtgtatgttatataaatgacattcatagccatgctgtggagtatattagattatgttttcctgcctaactttttgttttaattggagttcacagttgtcatttttaaaaagctgaagtataatttccatacagtgaaatatgtggatcagccagttttgacaaatgcataccacccacgtagtccacacctctattaagatgtagaatatttccttcattcctaaaagttacttgtggtctttcccagtccctctttaccttacatgtaatttttatattttttcatttgttagtaatctgtattcttatacttaatttcttcctaaattcccctttaactgtaacatacctcaattgctcgagacatttaggtacaacagatgaaatgtgttcattttcatcttctgggagacatttctcttaggccttctgataatctccgtctgaacagggtcctctgcactggatgcccacttggagtgtcttctcacccatcagcttgagggttcccttctcttctctcctgtgttggatttcttgttttctgtatcccctgtctttttgtttctacattttctctctttttggtgaagtaaggtttttattagcttctgagaaaggatgcatgggaaatagacctttaatatctgaattttttttaacttcacaattaagttttagattggaatagagttctaggttagaagtcattttcctgtagaataatttcagaattactattgagaagatataagccattctgattcctgatcttacatgtacgctgttttttctctcaagcatgatgatattttgtcttggttagcattaagaacttgcacaatgatgcaccttgatgtggatcttttttcatctattgctttaggtgtttgactttttaaaactagaaatcatgtcattcatatctgcaaattttctttagttattttattggttattcttggactattcatcgaattttctttttttttcctgttttttttctttcctccactccttttctgagaggttccttaacttaattttcccaccctttttccaaggtttttattattccatcagttttaaatttcaagcttttcttggttgctcttttcacattccttttgatagtatcatgttggtatttaaagaggatacaatgtcatgtctttccttactgaacatactaatgataggtctttataagaaaacattttcttgtgcctgcttaagtttttgtctcttctaagttacttttttcacgtcagagccattccttagatgtctggtaatccttggttgtttgttcttctataagaggggacaaatctccaatccttggttgtccattcatatctcaataggaccttaacaagctgattgatagctctcctcacttggacttgttgactttgcattatggtgattgggtatgtagagttttgggggatctctaaataccatcctatagcaatctattctctacagttgttcaagttttcctgtctagggatgagatgcaggcagctagtgttctgtccttgagtttgagtagtgggcttggagtgtggccattgcacatcagacttatacctgaggctccccttgttacctatgatgtgcttgtgtttgtaggctttgagtttgtctgggattccctgtgctctttacactgtggcttcctgttctctctaaagtcagataatgcttttccatttgttttctctctttcacaaatgtgttactttttcttgttttctaatgttctccctttatctttatggatttttaccttttaaattattttattgtcattttagtgtggtttcaggaaagatagtatataaacatgtggccaagctaccatctttaactatctttaatgattttgtggatgggatgtaaaaggggtagaattaaagaattgcacttggccttgggtatgtccatgggttagttatacatgtccacaacatctgaagtgaaggaaaggttggaaattactgctttataatagttgtatataactaccttgctaacttatttatatatccttatttattgtccttgcagtttgcctgcaagttgatgtttggtatttttgttgaattgaatttatttatccctagcagctaatatcttttctaaaagttttcttttcacttcagtgctttttttcattgaaccatggactcagagattaatctaaaaagaaatatatatacaaaaccaacttaacttacttcctttctttctcccttctttcaactttgcagattgcctaacagttatttcgtaactctttggacaatgaaacttttgttttttaaaacaatgcttgcttcccttctcaaaattaagaagtctgtagttatctgaactatgatatatggaacaccaacctaaattattctcgtggaatcatacagtatactagacttaaacctacaccgtatgtatatattgcctgtttctgattattcattcattctttcattcttttttttaaaaaatgtaggtaaatgggcaatgtgctggccacacagctatgcaagctgctagtcagaatggacatgttgacattttgaagttacttttgaagcaaaacgtggatgtcgaagcagaggtaagtaaacttgaaaaatattttaagtaaacatttatttcctagaaataatacttctatatcatgagatggattgtttttatttttgaaatttagtatccaactaaggcttttctgattgaaaataaaaatctgacagaggcaacttgaaacagttcttgtctttctgtgatcctttatattttagccatagtcctaggtaaagataggagttgagtttcatattactgtggtgtaaccatcatgttttaggagctaaaggtgggcttgtccaagaatcaagaatcatactagggaaattgaaggacgaggaatataaatccactgggtcagaatctttcctgatctctgtgacagttggaaactttttttgttgttgttttgtcataactgaattagcattttttaagttttattgtttcttgaccttaatgtgaatatttgaagagttcataatgcatgtttatcaccatatgtgtgtatatatgcttcatttaatttagaatatattcttataaaagagaaacacttcttaatatcattggagtcttgactggggatctctctgtatctctattgtgaaggatgtcttgctttgtcttacttaactactcattactaaaaatgtatttgaatcacacttattttagtatagtgcaagattatttagaataaatcaaattctagcaaatttaaattaggcagaatgttgcaattttgtctaaaaaacactctcatctgtgagtgcttaatgaggacttgaattgctgagggctaaattggtggatcaacctgattttactaattaaaaaatttaaaaagatgcatattggaaaagagaagccttttctagtcttatgttactttttcttttttctctaattgtatgtattttgaattgttggacagctactaaagagcctgtggtttttaagggtaaacaggtcatctataatgttggaattttctgctgcctagaaataacttgaaattaattaattaattaattaatttttgaggcagagtctcactctgttgcccaggctgaagtgcaatggcgtgttctcagctcactgcaacctctgcctcctgggatcaagtgattctcatgcctcagcctccccagtagctgcgattataggcgcctgctaccacacctgggtaatttttgtatttttagtagacacagggttttgccatgttggccggggtggtctcgagctcctgacctcaagtgatgtgcctgcctcagcctcccaaagtgctgagattacaggtgtgagccaccgcgcctaagaacttgaattttaaattagcatattagatatctatgaactatacaatagttttattactatgatgtctttatgaatgagattatataatttgatgttacttttgcactagtaatttttaagttgcatctttcttgattgtaagtttaggaacctagtgtgtgttacaagttttgttttggtaattaaagttaattttagtgttttgtatatagaatataattactttattttcttattattttagttttatttggtggaatggtatgaaatttcttgagttgaatatctgatttttaatttagtgaatccagaaactccaatagcaacaactactgaaaaaccaaagtccttctgattacagctaataaggcaagaagctgaaaaaccacatttctttttgcctaagtttctttttaaagttgctttcagattcagaatttaatcaccaacctggcagcatgggattattcatatatttgcgtttctagagatttttgttcacatgagaggttttgcagaatgggtttgcggctgtggaattaggaatgaaattggcactgtttttcaagagtaattttctttctttcctttttttttttttttttttttgagacagagtctccccctgttgcccaggctggaatgcagttgagtgttcttggctcactgcaacctccgcctcccggttcaagtgattgttgtgcctcagcctcccgagtagctgagattacagatgtgcaccattacgctgggctaatttttgtatttttagtagagttggggtttcgccatgttggccaggctgatctctaactcctgacctcgagtgatttcgcttacctcagcctcctgaaatgctgggattactggcatgagccccatgcctggccagattttttttttttttttgatacagggtcttgctctgccctgactggagtgcagtggcatgattatggctcactgcagccttgaattcccaggctcaaacaattctcccacttcagcctcccaggtagctaggactacaggtgtgtgccatcatgcttggctaatttttaaaaatttttataaagagatggtctcactatgttgcccagtttggtctcaaactcctggactcaagtgatcctcctgccttggcttcccaaagtgttggaattacaagtgtgagccattgcgcccagcctctttttttcttaattgtactcaaatacaaaacaaacagttagttaatactataaacatggtatgatgggagttgaagtgagtcttggtagtctagatatttataaatagttttttgttttttgtttttttttttttgagacggagtcttgctctgtcgcccaggctggagtgtagtagtagcgcgatcttggctcactgcaagctctgcctcccgggttcacgccattctcccgcctcagcctcccgagtagctgggactacaggcgcacgccgccacacctgtctaattttttgtatttttagtagaaatggtttcaccgtgttagccaggatggtctccatctcctcacctcgtgatccacctgccttggcctcccaaaacactgggattacaggcgtgagccaccgtgcccagccaaataatgtatttttaagtttgcaaactgactgctaactagaacggtgagatacatgggacttttaccatattcctcatttggatttccattttgtgcatttttttattttaaaattcattataagcaggtgcggtttgtagaagtgtgaaaagggatattaagaacacagtttcccaattggtaaaggaaaaactatattgaaaaattgagttaaaatataaatatcggccaaatgcactgattcacatctgtaatccaagcactttgggaggctgaggtggatgaattgcttgatcccaggagttcaagaccagcctgggcaacgtggcaaaaccatgtctctattaaaaatataaaacattagccaggtgtgctggcacacagctatagtctcttctacttggaaggctgaggtgggagaatcacctgagcccaggaagcccaggctgtggtgagctgaaattgcaccactgcactccagcctgggtggcaggagtgagaccctacctcaaacaagactacagcccaagactaaagcaaaagttcatcaaagtttaatttttctaggatataagaattaacattgcctattaaacaactatatagtttgtttaatacattggttctcagctgggggcatttaggctccacaagggacatttggaaatgtccggaggcatttttaattgttacaagtgggtgggtggaggaggtacagctgacatctagaggatagaagctaaggatgctactgaatgtcctacagagctcaggacagctctcacaacagtgatctggctttaaatgtcagtagtgctaaagtggagaaaatagttaattttgcagatgcacttagatttgtcattcataatttgccagcctgtttataaagtgatttgtttttttatcaacttttttatcattggaaatattaaacatatacaaaagtagagataatagtataatgaatcttatgtacccattgccccacttcaattaatactcatagccagttttatctatacacctttcctcccattccccctactgaattattctgaagcagatttaggtagataccatattatttcattagtaaatatttaatatgtattccaaaacgtaagggctcttttaaaaagtttctcacctttatcacacctgaaaatgttaaaaaactttattacacctaaaaatggtaataattgattttttaaaaatctgattttattaaaagctttggagttagcagaagaataaaggaaataatatattttgttctctagttatctcatttggtaacctttcttttttatatgcattaggaagtaggctcaagagagtatagatcagggtctgcaaactacagctcgcaggccaaatccagccctccatctgtattgtaaagtattgttgaaacacagcacagccattcatttatttactgtctgtggctcctttagtgtgacagtaaagtagctgtgtagtttcgataagagactatatggcctgtaaaaagtaaaatatttactttctggcccttcacagaaaagttgctggcccgtagcatagatgactattgcagagtttttggttgatttaagctgttatcaaacaattatttggtacatagcatacctttggaacatgtgataagattatattttgtttcctatttctttttcttagggaaacctcaaagagctcttttggaaagttgattgtctccatatattgacctactgaattcagtaggattacattctgtttcttctttaacgtataggtaaaggcatcaaggactatgatatcttaggtatgttgatataggtgagctaattttggatctgccgtggactctatttttttcccccactgatgaagtataatagtaaaggtatggagatttggatgggagatgagtttttaaaaatatgtctttattatgagtttccaaacatagtacatctgcttaagttataaggacatttggggtagtttggggtagtttcatcatttaattaaaaaaaaactgcttcaaatggagaagattagtagtagggaacaatactagactttgtcagataacccaaattttttggctagatggactaagaaaaaagaagactcaaattaccaaaatcagaaatgaaagtgggtacattactactaattctacagaaataaaaaggattataagagagtactatgaacaatatgccaacaaattggataacctagatgaaatggatgaatttctagaacacaaaacctgtcaagacagaatcatgaagaaataggaaacctgaataaacctataactggtaaggagattgaatcgatagttgaaattttcctaacaaggaaaagccttggaccttatggtttcaggggggatttctgccaaacatttaaaaaagaactaatattctttctcaaacttttccaacaaattagagaggagggaagacttcctaactcattctaaaaagccagcaaaaccagtacaaagccagaaaaaggcactacaagaaaactacagaccaatataccatatcaacattgatgcaaaaatccttaaccaaatattagtgagctacattcagcagcatgataaagggattatacaccatgatcaaatgggatttattcctggaatgttaaaaatggtttaacataggaaaatcaattagtgtaatatgccacattaacaaaatgatggggaaaaactgcataatctttccaattgaccagaaaaagcatttgacataatttaacaccctttcatgataaaaacattgaataaacttggaatagtagggaattacctcaatgtaataaaagccatatatgaaaaacccacagtgaacatgatattcaatggtgaaagactgaaaacttttcttataagaacagggcaaggatacctgcttttaccagttctatttaacagtactagaagtgctgaccagagcaattaggcaagaaaaagaaaagacatccgaattggaaaggaaataaaaattatctctgtttgcagtgatcttagtgaaacctaaagatttcaacaaaaaaacttttagaacaaatttagcagtttagcagaatacgaagttaaaacacagaaatcagttgtatgtctatacattaacaatgaacagtctgttaattgaacaatctgttaacaatgaatctttcaggaaattgagaaaacaactccatttacaatagcataagaataaaatacttaggcatgaacttaacgaaggagataagacttatacattgaaaactacaaaatattgctgaaagaaattaaagaagacagataactggaactacttcccatgttcatggattagaaaatttatattgttaagatgtcagtactacccagagagatctacatattcaatgaaattctgtcaaaatcctaaagatgtttcttgcagaaatagaaaaatctatccagaaattcataaggaatctcaagagagccccaaacagccaaagcaatcttgagaaagaacagaagttggaggactcactcttcctactttcaagacttaccacaaggcaacagtaatcaagacagtgtattactaacataagggtggacataaagactgaaagaagagaattgagaattcagaaataagcctttgcattaaggtcaattgctttttggggtccaagacaatttaatgggaaaagagcaatcttttaaacaaatggtgcttgggcaactagatattcatatgtaaaagaataaagtaggaaccttacctaacactatatacaaaaataaattcaaaatacctgaaagatctaaaagtgcgatataaaactataaacctttttgaagaaaaagagggcaaaaacctcacagcattgtatctggcagtgattccttggatatgacaccaaaagtacagtcaacaaaagaaaaacagacaaattagacttcatgaaaattaaaaacaacgtgtatcaaaggacatttgtcaacagagagaaaaagcagcctatgaaatgggagaaaatattttcaaatcatgtatctgataagatattaaaatccaaaatatatatagactcttaaaactctacatcaagaaaacctaaaaaactccttttgacttgaataaacatttctgcaaagaatatgtatgaatgatcaataagcacatgaaaagatgtttaacgtcactaattattaggggaatgcaaaccaaaatgacagtgagatactgccttacagccattagggtggctgttatcaaaacaaccagaaaaaacctgtcagtgaggatgtggagtaattagaactctttgcactgttcataggaatataaaatggtatagccactgctgaaaagaatatgacagttgcacaaaagatttaaaattgaattacaatatgatccaacagttctgcttttgaatatatatcccaaagattggaaaggaagtcttgaggaggtatttgttcacctgtgtttttagcagcagcattcgtaatagctaaagcatgaaagcagcccaggtatccattgacagaagaatggatgagcaaaatgtggtatgtgcttataatggtagatcattaaacttaaaaagaaaggaaattctgacacataagatccttgaggccattattctaagtgaagtgagccagttacaaaaagacaaatactgtatggttccactaagaagtatagatagtagtcaaaatcatgggaacaaaaagtggaatgtatggtggtttccagagatgggggggtaggaggaatagggtgtagagtttcagttttctcagtttttaatgggtatagagtttcacttttgcaagatgaaaaaagttctagagatggatggtggtgatggttgcacagtgatatgaatgtacttaatatcactgaattgtacatttaaaaatggtgaagatggtaaactttatgtatattttgctgcaataaaaatattaaaaaatcatgatggttatttaaggattatattcaacacccatttttattcttactagttaataatcactgtgctagctcctggaaataaggatgactaagacacagtcatagcccccaagaagcccacagccaagtaaaaaagacttcaaacaaataattatactatagtgtgagaaatggtataataaatttgtgagagtcaggggaaatttcacaggagaagtgatgcctgagctgagttttatgagatatctagtctccagtccaagagggtgacgacaaagagcactccaggtctagggagtagcatatgaaaatgtataggatcccataagttgataagttggagcctgatatctgaggggactgtggcagcaggcgaggctggaatggttcacagacgtaggtctctaaagagatttgttttgtacatagtagagagacattgaagaggtttaaacataaaatttgtgttttacagaaagaattatgactttggtgtgaagaatagattgggataagaaagtgaagggaggttgagttgtggtaatcatccaggtgagtaagaatgaaggcctgaattagtctgtggtagagttggaaaagagaatagatatgagcataaattgaggagtaaaagctgtagagtttggtgattgcacatagagggtcacagagaggaagcagttgactgtgacttacagatactgattttgttgaccatatggtctgtagttctatcagctaagataggcaatactaaataagagcaggttttggaaaatggagagagaatagggcagggggatagaaagaaacacgatccgttttagatttaatttgaggcctctttatgaaattctttgagataatcttatagaggttagctgtaaccttgttccttgaaattctcttttggcactaggaacaggacaggcacatgagctgtgttttaggtttatttggagtatttaagatggattcagaagaaagcaacaaaacttacaagttaagattttattataactgcagttttctaatttagaagagaaacctggaagtaaatttaattatatttaattgtaattttctagtgtgcgtgtgtattttccataatttaaaaattattcttatttatttccttttgacaaacatatcagtttttaattctttggtgtttatttttatgtaaattattgacagcctgcattaagtgtttcagtagtgattttctaacaaccatacagtgttagtggcctgatgttcccttttttaatggaaggtgaatcacaaaatagggttaaaaactgtaacagaaaaaaaaaaaaagactggaagttaggaagattttaactctaagattctgaattatatctgttactagagagattaacttagagagattaacttatgtatacatgcatatatatcttatttttgttttgttttttaaaacacttgtttttctgggatgtttgaatataatgctactcagaggcacaagagttgagagaggtgccaaatcctaaccacaagacccccagggaaaaggcacaagagttgaatcttaaatcttagatgtggttgtttgccagttcctttctcaaaattgatacgtaacaaaaactgattcagctggaaatatcagtaaggtagaaatatccctgagttgtaggtccctactgttgtggattcctacatgagtgcttttacctttaatacctgtttgagaaaatacgcaaagaccaaaaactactttgagttctgtaactgttttgaatgaactatttaagtgcatttaatcataacagtgtttatctgtgctttctttgaaagtagttcagataatcctgggtgccatatggattgtcagaccccttgcaaaactagggagtccaccaggggctggcacagtggtattgggaatcggaaaccactgctttggatggaggaagtcttagagtaccaggatcagggacagacacatggtcttggtgggtgttaaaatttgcaatgcagtattggaataaatgcaatacgcttatacctactacccttttccatctgcttctggcaaggcagtgagacttcttttcatactttttggtataagctatgtatactaccttcatggcgcagtgcaggcagtttttcccctttataaagtaccttcttttagttttaaaaaatttaagcaatttggtctttcctgccttctcatttcttcagaaatatgcctgttacaggaggtgaggcaaatctatttgattcttctgaaatagttttggaatttttgatatatggaattttggtagtttatgcttcgtttttatcttttaatggtgtatttaattttttttctgttctcgaatatacagaaaaatgtatgctcatcacttaaccagttttaatgtgttgataaattgctccccattaaagccagttgagatcacattgtttggcattctttttttttttttcaatcacacaactcatcttagtttactttttgtgtcatctttgtaggacgtgcacggtggctcacacctatgatcccagcattttgtgaggctgaagttggagaatttattaaggccaggagttaaaggctgcagtgagctatgactgccactgcattccagcctgggtgacagaacaggaccctgattctttttttattgagaggcagtcttgctctgtcgctcaggcttggagtgcagtggcccgatctcagctcactgcaacctctgcctcccggattcaagcagttctcctccctcagcctcccgggtagctgggattacaggcatgtgccaccatgtctggctaatgtttgtaattttagtagagacgggttttctccgtgttggccaggctggtcttgaactcctaacttcaggtgatccgcccgccttggcctcccaaagtgctgggattacaggtgtgagccactgcgcctggcctaggaccctgattctttaaaaacaacaacaacaacaacaacaaaaatggtctttgtaaaaatttttaaatgtcaaaaaaaattggcttaccatcatggctgataaatgaggaatgctgaaagttcaagctgttggttttatatatatatatatatatatatatatatatatatatatatatataaaattatatataaatgtatatatataaataaataaatacatatatataaaatgatctaagtttatcatttatctttgggagttagtcactgttcaagtcagtttctaggttttaaaaaatttttttatagagacagggtctcactctgttgccccggtcagagtgcagtggtgcgatcatagctcactgtaacttgaaactccttggctcaagcaatcctcctgtgtcagcctcccaagtagctgggactacaggtgggtgccaccatgcctggctctctctacaagacaggatcttgctatgttgcccagattggtattgttggaaatcttactcacatttacagtttacttggcctcaagtgatccttctgccttgtcctcccaaagtgctgggattacaggcatgagccactgcacctggtcaagttctagttattttgttgtttcctacattgccttttctcaaattaatctgcttcttggtatattattatagcttcaaggtttttttctttctaaaatattcactaattcacatttcaatactaatgattaggataaagatggtgatagagcagttcaccatgcagcttttggagatgaaggcgctgttatagaagtactacatcgaggtagtgctgatttgaatgctcgaaacaagcgccgacagacaccacttcatattgctgtcaataaaggtcatcttcaagttgtgaagactttattggactttggctgtcatcccagtctccaggtaaaacctttaaagaaacacatcctgcaggtattgctaggatcctattaaagggaaacattaagttctatggtaagcattcctttgttaccgttctcatatgtcatagtaaatgataccaaaggcgtaagatgttacaaaattggcagctatttcttttttaaaaagttgtttttttttagggaaaatgccaatagattgggttttgattgggcagggagaatgaggacttctttgtaaaaatatcagcttatgaatggatttaactttattgatcatgacagtgagctcaacagcttaaagaagtgtaataggctatatttcataatagttacttcataactatttaaattattttaattgtagcttttattgtagcttagggactttgaatagtcgttagtgtaatcttcggagatttctgttttggaaaatgtataggattttagagttgatttacagtaggatctaatttttgaagcaatgattgcctaagaaatgattatccccagctacagttttataaccagataaattaaaccacaaatatatagaaaatgtagtctgtgtccattttctgcttagtttggttactaagcaacttgtcttttgtgcacctgtttgattaaagtttctatacttagtaattttgtagctcctgaatctaatttgccaacttttaggttccttaaccgaataggcttgaaacaacatattatttttaaataaaagtgttccctgaaatactatttgaatatgtaaaacataatttgtttccattggaaactcaataatgattttttaaaaagtagggcagtggttagaatcataagctgcttgtagtttagataatttacagcatccaggaattggttgctggattggatagatctcagagaagaaataaagaacagtagtagtgggaatgagggcttgagaagaactgaaagaatagattttgttcagctagataattattagaaattaaggtttttgaagtgcagctgttttggaactgttgggatctagagtatgtccttgtaagtgggaggcaggattggaggatgagggaagaattgggggggtgttaatctgtaaggagaggtgatttatacctgctgacgttttttgtctgaaatgggagacaagttcatctgttgagagtggtgggtagagaaagagtaattgagaagagtgataaggacttggggacctgcagaagggtgttccaatcatgttagaagcccgtttcaggttgaacactacagatttttagtgccgccagatacaggagtagaaggtagatggtagatggttggattgaacttgggttaggaattctttttttttttttttttttttttttgaggcagggtcttgctctgttgcccaggctggaattcagtggcgtgatcatggctcattgcagtctcaaccttcagggcccacctcagcctcccgagtagctgggactacaggtgtgagctgccatgcctggctaattttttgtagaaatgcccaggttggtctcaaacttctggtctcaagcaatcttcctgctcccacctcccaaagtcctgggattaccggtgtgagccaccatgcctagcaggaattctttatgtaggtggatgaatatattcctgggattagcaaacattttctatattgggcacagataatagtggcttattggcttttgccacaactatctaactctcattgcagaatgaaagcagccatagataatacataaatgaatgggtgtggctgtgttccaataaaacttaatttacaaaaacaggtggctccaatgtgtaatatcctgggatatcattttttctaggctttgtccacatggcttaggggagcatagggctctgccccatgatgtacagtccctttcctcagtgttggagatgaagctgggtctggtgtttgcactttcatattcctgtagcttctcagaatcctgtggacagtgactggggagacaaaccatgcaggaaatatgtctagtaaaaaagaataaaacaaacaaaaaacaagtggcaaactgaatttggcaactgtagtatatgctgtaggccaggttgtatatgactttactgagaatagcatctgttcaactatgaaatgaatgaaatttaaattattcatgtctgtacatgactgctaatgaataaaaacttactgctaagtcaattgattaatgtaaaaagtagtcagcttgaaaaaatggtagactgagattgctaaattttaatttacaattgttttacctttggctaactagccactttgctgccctttgaaaacgcttagattaatgtttctcacctgtgactgcacaagatgttcatctgtggagctttgaaaaattactcatgcctcactctcacctctagagatttagtatggtgaacagcctggacatcagatttttttttctcttttttttcctctgtacaacagattttaaaagatctccccagcaggttctaatgagcagccaagtttgaaagccaccgactttcaattcattgttatggtgtaggtttggtatggaatttcagggtatgacaattaaggccattttaaacttataaaatttggggggcagctttatcacttcactggtttttgtcattagttatatttgaggctacttcttttcttttctttttgctttgtaaagcttcagcatgtgccaggagtggtggcttatgcctgtaatcccaacaccttgagaggctcatgtgggaggatcacttgagcacaggagttcaagaccagcatgggcaacatactgagacccccatctctacaaaaaaagaactttgccgggcaaggtggctcacgcctgtaatcccagcactgtgggaggctgaggtgggcagatcacgaggtcaggagtctgagaccagcctggccaacgtggtgaaaccccgtctctactaaaaatacaaaaattagctgggcatggtggtgggtgcctgtaatcccagttacttgggaggctgaggcaggagaatcgcttgaaaccggaaagtggaggttgcagtgagctgagatcgcgctattgtactccagcctgagtgaaagagcgaaacttggtctcaaaaaaaagaaaaaaaaattccagcatgcttattttgttttccaactagatttgagtatgtctttccttactataatgtggccagtgtttcttgcctgtatttttgttttttatatttttggagatagagtctcgctctgtcaccctggctggagtgcagtggcatgatcatagctcactggagccttgaactcctgggctcaagccattcttctgcctcagcctcctgagtacctaggactataggtgcacaccgccgtgcccggctaatttttaaaattttttgtagggacaaggtctctatatgttgcccaggttggtgttgaactcctggcctctgctgatcctcccgcctcagcctcccaaagtgctagggttacagacatgagccagcatgcccagcctttgcctatatttttgtagttatcacagaaagtgctcttttattggtatttgttggatgtggtctctgcttctgtttgcttagcatttggtgtaagtattactattagatgggataattaattgaagaactaatgaaaatttctttaaacttaaaggattctgaaggtgatacccctcttcatgatgcaataagtaagaaacgtgatgatatcctagcagttcttttggaagctggagcagatgttaccatcacaaacaataatggatttaatgctctgcatcatgctgcactaaggggaaatcccaggtatgtcaccccttactattttaggtgcaattcaaaaatattttcctactgttgattctctttttctgatactgatgaagaaataattttggctattttagtattttaaatcattttaaagttttgtgaatattatgcctttagttttatatgatgattatttggttgttaatctaatacaaatattatgaaatgattatttaagtttatattaaatgtggttgtaaaatatcaggaatactagtttctttctaaagatttaattaaaatgcattttattttgagatttatgtttcttcaaaataattatctgggtgtcctctaatttcatgttgccatttgcacgataattattttttaaaacttaagactaaataaatactaagttacctaattccttattaataatgtaattagttatataaacttctagtatagctatcccctcatccattgttacagcaatagtattctactgaaaaaagtatttgctggttgacatttgagaaagactccttttggagaatcacattctttatgaaggatctgcggtgtcccacagaatgggaaaatgcttagctttgcttaatttagagatttccattaactcactttttggaacaactttaccctaagcattttaggaaattctgcattggatgtcttctgtttatgtttgagtcaaacctgtatacctggactaagaaaaatcttcactttgatttttattttgataattttatctattctgaacacttattctttggttccttattgtatttttatatcatgtttcctttagcttcttaggatcaccactagagggtgaccacaggaaacaaaaggattttattgctactgcttattggtaactgtaacagtgggtatatattgtaggacaaaatgaatgatcatattttagatcacatcttgattttttttccaaattgcaaatatttgaacacttcagattttggcattgtgaagaagacagtagtattatatttccctgcccttcaaacagaagattatgatagcactttccacatgccagcctctgcaaagtgcttcacatgcatcatctcacttaatcctttcaacagctttttggggcaggtgttaatatcctcattttacacgtgaagaatatgaggcttatagagatgaatttaattattcaagaacacgtagctgattactgaagcagctgtaacttgagcaaggtctaggtgactttagaatcataactgttaaaccactttacatcaccttttctgtattatggtctgtctgtgaagcaagaccaaaacacatgggcagtgaatgtgtcaatacctcattcctcttgctgcttcattgcttagagttatctttgctctctcaccaattcttagcttccaactagttttaaaattttactcattctaccaatccttccaacccattccattctgttcccactgttgctgacccaattaagtactcaccacatttacctagactattatactattcttctaatttttttctttgatttcagtctttttcttgatttaaattttatacatttacaaattatccattctgaaagcataggtctaaatggctctcttcccctgtttcccaacttcagtttttgtctgttaacatagaatacaatctacacactttggcttggcattcagacccatattctgtgtgtcctgagtctgtttaactttatctcctgctaatccaatccctcagcccgctttgcccatcgtctattctcctttcctaaaatatgctgtctgctttcttcttctattttttggagcattttctttctttgggatgccccatcccgcttctttatcttaaccgtctttcttccagagctacctcctgtgtcatcactggaattattttgtttgctctatacttccttgttctgtgtgtgttttttttgttttttttgtttttttttttttgaggcagagtcttgctctgtcacccaggctggagtgcagtggcacaatctcggctcactgcaagctctgcctcctgggttcacgccattctcctgcctcagcctcccgagtagctgggactacaggctcccaccaccatgcccggctaattttttttgtattttttagtagagacggggtttcacgacgttagccaggatggtctcgatctcctgacctcgtgatccgcctgtctcggcctcccaaagtgctgggattacaggcgtgagccaccgcgcccttcctctgtgttcttatttattatacttactatatactctgcttagtgctgtttattactatgtgcacttctgtctttctctttacattgtgggcattcatattcatctgttcatcctacatatgctctggctatacaaggcactcaataaatgttagtcttactttgacagtgagcacactgttaaatatcacaagatgttatatgatcaattacaaaatgaattctgtagagaaactgtgttaggaattcaaacagcaattacttcagattacaatggtcaaaaagattttattgagagaatttaggatttattgagggaatatgaaatcataaagtttagtataaactgagaattgaagtgcttaggaaacaagtatcttttaaatattttgagttgtttcatttttattgagagtaggcatagtatattcaataatgctaagcctatacaaggaagagaaaatttacttttatttttttcaattcttgcataaatcttgagggttcccctgaaaatttaaaacagcacctcttccaaccagatatttggtgtcaggtgacatttaaaaaaaaatgcttttattctttaacaaagtagtgcttcagttaaagctacatgccttctttattcctacttccttaagacatttttaggtagttgtgactatagattgccagatagagtgtgattttaattggacactgaagagtatcagatgacacagcttatattaccagttgtaattgcaaattgggatgttttgaattctttttttcatatcaaatttctttttcttaaggttgatttttccccccctatactgtccagtgatgtcagaagacagaaggtgccatttttagtgtactcggaattaaaaataacaaccagtctttttggcctttatactatagaaaaccagcagggtgtggtgatttacatttgtaatcccagcgacttaggaggctgaggcaggaggattgcttgaagccaggagcttgagatcaacctgggcaatgtagcaagaccctgtctctaaaaaattaaaaaattaggctgggcgtggtggctcatgcctataatcccagcactttgggaggccaactcaggcagatcacttgaggctaggagtttgagaccagcctggccaacattgtgaaatgctgtctctactaaaaatacaaaaatcagctgggtgtagtggtgcgcacctgtagttccagctactcgggaggctgagacatgagaatcacctgaacccaggaagcagaggttgtagtgagctgagattgcaccactgcactctagtctgggttacagatcaagactgtatcaaaaaaaaaaaaaaaaagaatcagctgggtgtggcatcacagacttttagtctcagctacttgggaggctgaggcgagaatattgctcgagcctaggagtttgagactgcagtgaggtatgatcgtgccactgcactacagcctgagcaacatagcaagaccctgtctctaaaaaaaaaaaaaaagaaagaaaagaaaagaaaaccagatatagcacgttgttatttccagaacctgatgaagtgtctagatgtcctatatttttgaagactgtcctttgaagtctctatttcaaaggtgcagatcaatatgagtctagatttcaaagctgatcttgatgttttctcatagtatgatagtaactgaaacacattaagagaaaagagttacaaagccatttattgttgtcttttagaattgtggaagggaatataaattttcactatgagaccctgagtactttggttgtgctttataaagtttggagcattttaagtagaaattacaccatgttttaatacagttttgttttttttgagaaatcttaactaagaacaatgctgtttgtctgttctgatagttaatatttataggcatgttttcatctagagtttagccatatttatcatctcttagtatataggtaaaattttggatttaaagtaagagtagaaattatttctgctgataaaagtgaaaactgaatttctttggagtagcataatcagcatgttacttaggtactttctgtaaagatgctgcatttttagctgtttttagagctcccttacaggcatgaaaataaattagtcagcagtattctctgcagagctggcaaaaacaatcgataggtattttggaagtacaggtaacaataatataattataaagtttatatagtatttacgaatttttcttgaatagaaattgaatgtgaaaagtaaacgtaaaatatgagtgaatcacctgatgtgatatatgttgtttttaggttggtactaagataatttcacaggcgtttcttatttgcttactaattcccacaaagacacatattacaaatcttactgaatatgtgagcaactcatagttttccttctcgaatgttgtgatgctttttttactttttaaattctgaaatatggtctgtaaacaagactatgttggctatttgaagatttgataagctgtactgtattttggtgtttaatgctttccttacaactgtaaacatgctgagtgctatctacaaaatatagctgagtctattcggtaataggatacttagagtgtgttttctctaatgtatgctcatgcatctactctcaaacaccatattccttgtaatacacaaatgtactttctgtgactgaggtgtaattaataggaggaagaagatcttgaatgaagtgataagatatatatttatatatgtctccttttgcccacagtcttttagagaatgatgttcattttgaaatggaggagtggtcaggagttgagaatgtgtgaacatctgggtctttaaactactcttgtcttcagtaatcttcattaattgctgaaatgtttgtctctattaaataatattaaattatctatagttttattgcaatcattaagaaaattatacggatgttagagtaattgtcactttttttctttacttcagtttatccccactgaaggagaatattgtgtgtatattttttataagggacaaagaagacagtgaggagagtcatagtatttattgttagcagagttcttcattttacagctgtgaaaacaaatatggagaggtgaaatatttcatgagtaaaagtagtgatgcttagcattttctttcttttttgaagactaaaaacctttgattcagggtcagaagaactagataactgttttaagcctctccacaagatattctacagttatcatctttttcaccttacctgctaacattcaggtaaatagcggtaaaattaaaggccaatactatggaagatagtgactaaacatttctagagtgttatataatgttacagttttctttaatttaaatatgcacacatccatgtaaaccacactgtacaatcccattatgtgttcaggtgggttttaggtgacctttccagatattttcttcctttgaaggaagtttttgttgttgttgttattatgaagcatagcctacattttattaccagttcttttcttttctgaaggataagaaatttaataccaagagaccataataagtaaaatttttatttgaaatccttaagtcatccatacatttttcataaagctttttataaacatctttaaccattctagcttttccaggtagaattaacagtaacaagttatttgattataatcacagtctgcataatgtaaataagttgaaattagttggcaagtaattgatattcacaaatgaaaacgttggttgtcccgtagtaatcaatgcatagctacagctggttgaaggggaccaaatccattgaagaggcgatttggttccattttaccagctctagcaaagcattgtagtgctgctagtttggaatccaaaacagttaaatgcttttcattggtaaaattacagtcatggaccttctacaagtgttagaaattatcataccaatgcttcagtcactgaatgtcaaattttccattttgaagtcactttcctactgttttcctgcgcttaatggtttaaaaatcttttccttttaacacattactgcattaaggaatgatcaatgtacgtctttgttttcaacatctttgcttctttttctttttctaatcttgtccacagccgaagtctttgcttaattcttacatgtagacaataagctatttcaaaaccaatagtatttaaaggaacaaatagaccttgatgtattttagagtaatgttttccatttatctctaggcagcaaaccagataaatagttaagctaaaaggttggggaagagttcagttagtcacccccttctactgccactgcttcttttagcattatagttgagggctaatagcaaattgttgatgggtgtaggaatatcagtggccttaagaaagtacctctgccctttgatttataaatagatcacatgtgtattcagtgtattgcttggacttgtgtcgaaaggaactaccatgcatgccagtttttctttgtttttgcttacgtggtgttactaatcatagcttagtaatttaacccttttaaaggtctatttccttgactaagttctttgtcattttgggtacagattgccaagttacttctcattatcgccttagtaatacatggtggttagttacaatccatggatacaagtattaaaatctattgtgtggataatacttgaaaaatcagagtaaatttttgttataatgtggttttactgttgatttcaatgtcttgagaggggtgtcttcttgcataaaataaaagtttgataaattataatttgcctataaagttaagtgctctcagagaaatatagagtagagaaatattctttacagttactattttaaactgagaggtcaacgctaattcaggcagtatgcaaatgactcttacactaagtatattctgcgtctgttggttggtaagtatcatactgctggtgaaattaactacaattctttttcatcattttttctagtagaagtgaaacaggtgttaaactgcctaaacttaagtgctgaagatagcaataatactggcttctatttttactagttatatgggagctgtttagcagatccagttgctcaagtgtgtttttggatggcagttcagtttcatatactggccatatcggggcaaggagaggccatgggaaaaaaatagtacagcatttgataatgtcagcatctgttatccctgtcagggagacagttgaaatgtttgagttataccagtgtcagcagatgcccagagtttaatatgtactcagttaaaaatgaacagctgatctaagtgatagatgtgacattttagagtgattgaaaatactcttagataagttaaactcgcaagcaccagaatcagcatataattttacttttaaaaatgaatagcctgtcattttattttctaaggattatttatatagtcttaatattatagcaaagagagtcttagttgctaggatgtttgagaaggattattaaacaacttgtatacctatagaatgaccaatataactgtttattataaaacacaagtagagtaataagctttgagtatttttatagaagaacctctacttttgaggtatatattttgagttcttggtatttaggacctatacaggtaaacttaccaaatagaacatgaatcattgccattctgttttgtggatgatcagaagggctatgcttatgtgagttaagctttgaactaatttctttgaaagtgtagaattttaaaattatgtgccttttataatttccagtaaacatgcagtaacacatatgatgccatgtgtaagtcattctcattctttataatctgataaaatgaaaatcatctttgtattaactagtcttattaaacagaaaatgaactatagttaaacttagtcatttccattcaatttctgatacaaaaaatttaaaatattatgcttttatacatgtgtaaatatttcagttgaaataatacttttagtaagaaatggttagaatatgtgaatattactcttattttctaactttgtcattagtagcttaaaacaggtactgcttataaattttgctaagagcattatttggaattttttataaataatatacaaactgtgtgaaataaaagtattttgatatttctaaacaatggattgatcaagtttagagaaattgaattgtaattgcatagtacaataaaaacagttcttcgatctgtataaattggttcttgactatagtgctttcattttacatgccctctttggagaaagcaaattcgaagataatacagataaattaatttcttttaaatatttggtagtctgttaccaatataccctgctgacttacagctgtggaccagaattttgtcatttttcatgcttaaatcttacattttaattaattttaagttttaacttcacatttaaagtagagatttgggttaagaccctgataaacttgagaaggaaggacaagggccactatgtttgtagctgtcaaaaaagaaagcctttttaaaacaacaaaacttttggtcagaaattcctctaatattaattatacatttatcaaaatgagaagaaatagcttattatgtgaatgaagccagctcttagtatcttatttttctgtacaaatcagtgagccctactaatgagatatacttaagattaaattgtggagacagaaaataggtcatgtgtattcctcattcttttgtgctagtaatactattttcccttttgcagtcaaattttaataatgagagtgcctaatttaaaaatgtaagatgtctgttttaaacttagatgatttaaaaggagtttcatgataattgaaatctacttcactggatcttcttttccttcatgaaataaaaaccttagggatagtttctatctatcagtagtagataaccttttttttttggtgttagtattgccaaaggtcatctgttcatgactaggttaatttaccatatgacggtcattcacgtagaaagaagcaagagcttcttttagctcagtttaattctcccttggtggtttattgcctaccaaaaatacatacttctttacattccatagcattgtatgttcatatgggtacataaagaagtatgtactctgagtaggtattactaagttgttagctgtaaaaacatgaaatattttattttcttatttgttagtgaaacattcagcttactaatgtagagcaatggtaaatcatttgcagagactaatttatcgaagactaaattttgtaacaagtttacctgaagcatggcattaatggttccatattcttggtggacatagacattcctaagcatttgaccagttatctgttgaactttgtcctggtttgattctttttgcaagagattcaaagaatcagtgtagtgttacagagtgtatttcggaaacttaagatcagcctagtgtttcttcagtcttcagagtgaatttcttctttttttgtagtctgcttctagatcctacaggtagatagtaattaattaaattcaattttttttttacaaactagatatcttactcaaaacctaacaaattaaccaataagtatttctgatattgactctagaagttgaaacaacaaggagaaaaaccaggatgagtgtgggtgaattgaacttttttaaagattatgaatttttgttagtgttttataaggtcacagataagaactcgtgatcatttgaaaatttgtcattcttttttctttattagttccttacctgaagtttgcactttgatgcttctctttgggttaaatacaaatatgagttgaatacaaattcaaatagatgtagaaatatctaattttggtgagtttaagttgttttgattctttaatctttttagtataaaggataactgtcagaatcgtcaacttttagaaagtatcacttcaaagaactgaaaggttttagtctgtgagcacctgggttttatttaccttgatagtttagaatgaaaagaaattatagttggtaagtagccttcagttattgtggtattagaaggttaatttaaaacctcaagaaattttcagatttgtcaaaggaggaaaaaaaagggcagggatagtagaatttctgcagcttgtgataaaaagctagtgcagcttatagagagcaaatcagaatgtagcagtagatagcccagcactacagcagtttcagcaatgcagcattagaattacaccatgcacgttctgatttatttttgtggccaattattagtaagcattaaaaagtattttatgatctgccaagtttcttggttgactaaaccttgaaatagaagctaatagttttagaaaataagtatactttggaagcaggatgtgacttactagagatgcaaaatcatcacttaatctgaaacaataatgactaaatctttaataatgtaaatgacaataatgtatttgtacatttttaagataaaaagttactgccatagtatctgaacaatattcctttttacactacattagctcttaacttgaattgtgaaattaggctatggttagatagaatttaatttaacaatgagaacatatattgagtcaataataggtaagcatgcagaaagtcataagcatccttaaaagtacaggccttatggtgctctgttacctgtaagcttagtgtcatgcagcatttgcagcaggaagaaaggtagtaacctagagaatcacatcaacagcagccatctcatcttgattgttcgttcactctatttgctgattcagcatttcttttcatgagcccggtgaaggaaggggatgtatcagtgaacacagaacctcaccttttaagataaatttgaaaaacaaacgagcaaacaaaaaacaagcttacttttccctctcctcccctcttccctttaccaaaaacaaaaacaaaaacaaaaaccaccaacaaaaacaactctaaaattgaatcagtgttggccatttgatttggaatgtcatataacagtcttgcacagttatatagggaaagttaagcaatcaaaaaaggttgctacaaaggccaagaaaatgaacctagcttgtcagatgaaatgcttcagaagaggggaaaaagttgcagaagttaattttatagtctaaaaaagacaaaaaaaaaaaaaaacaaaaacagaacccaaaacacaccttactccccccaaataactgtaaacattcaccctgtttttctttgccctccagaatacattgggttcttctgacttcttaggaaatagtctgcatctttcttgcttttagattttttttttttttttttttggtttttagtttccaggattaaatagtagagctgtagtgaagctaccttgtcacatccagaggtcaagtctgcaagcgaggtcaggacttccacatggtcactacgaggctaacttatattcttcctcagtgaccactggctaaactgttacagctttataggcagctaagcatttgaaacatgcactcccaggcaaacaggctctcttgtgcctctctcttccctgaccatatttagtcaaccatagcaaaaaatagcctctcagctgtcgattgtcgatccaaaagctgaggaagcctcaatcttgctttctgcctattgattgttcatcctgcggtccaaacactgcttagccatttgtcctgccccccacttttttttttttgagggggggtaagcactgccaaataaagcggtctctcatgtttccacttacatttcccagattttcactgagcttgcgctgagactaggaaagcctgatgcactgtcactatacttagaagcactgcagagaaaaaaggaaagaggaaaaaaattaccatggctagtagcaagacaatctttagacagttatggaacaagtgaagtccctctgctgccaaaatacattttataacctgattttttgattgataaaaaatgttatggatggtgatatgttacatatctaaaggcctgaaaggattttgtagggttatctttagagctagttgttgccatatacatgcttttaaagtttattgaatggaaaatgtatagaaatggtaggtaagacctgtatattggtggtggagagacatcatcaagggagaagaaagtagtatgtaaatgaaatcttagaagtgctacttaaaacaattcactgtcaatttcagttaattttttttataatgctttggtaaaaaacagggtccagtatgcttttgagtaattatacaagtattcagatgcattttattatgaattctactttatattcaaatgtgtagtgtttttgctgtcccttctacattgtcatgtttctctaattttctgaagtgacttttaggcatgatcattgcacactttacacagattgaaatagtcattaacctgtctataactctattacatagtatgtgactcagaggtaaaaatacttttgttttaaattttaatagcatattcacaatagattttgatactgaaatttttttaatcaaagagaaaaaatattaaaacatgaagtccagtaaacctgtggagatatagtttaagatctcacataaaaatgcagaagagaaaccagctataccttgttttttaatccaaatatgtcctcttaagaaacaagaaaaactattacgagttttctgagcttactcacctacggaagtttgtccttcacattcttgttgtctttagcatttaatatcatagcagtttaattattttgaatgtctgttttaaaacagtggcataaggaatacttctttagatattgggcaattttaaacagctttcctagatattgaaataattttactcatattatgagaagatgacatgtctcagagtataaagtaggttaattttcagttttctcaagtaccccattttgttaatgattttgtagcagtgaaagtacttattttttaagcaaacacttacataatgtgttatgtgccaggttctctttctaagccctttataaatattaactcatttaattttcataacaaccctataaagtaggatttgtgattcttctcacattttacagatgaggaaactgaggcacagaagttaagtaatctgctgaagtcactagccattgtggctagagccagaatttgaactcagataatttggtttcagactgggagctcttcaccactatgccacattgctcctcagatttgtgataatgaaatgagttaggaaattattcctcttgggaacaaaaccatgcatcaaatatatattgccaatatctttgcctcagtatattcagaaagatgattatttgattatttgtttattcatttcttccattcaacaaaactttgagttccctatactaggtatacaaagtatacctttttgatcaaaatgtgttcagttttatagtaacctgcttttagcatgcccaaaagaactactggcagttgatcagttttcttaataaattcctttttgaattcttgactaatctacattaccgatttgagggattgtttattaatttaccaagcatttattgaacacctaatatgtgctacagtgctattctaatgttgttttgccttaagtagtactaacatgtaaggcctccacagtttagctagtagggtttgggaaaatgttgcctgcctctgaagaaagattgcaaagcatggcaggccctaaaaattgacccagtgccacttgaatactgcataccagtgtagacagctgcttgtcccctctgcttctttataactcatttgttcatcattcagcaaacgtttgaatactatcatgtgccagggattatggtaggcactgctattagttgttctggaacttaatgcttctttggcactattcacaaatgcctgcttaactggtagtaagatcttatctttaaaacatccatgtccttaacctcttggaaaacaaccaaattgagcattagggaaaatatctctaaatctcatatactatgctccacaggtgagacagtctattggcttaacaaaattactgaattctcgagctggtaacacctttttcccagtaactctacggacctcagtgcttgcagcttaacagtctcctcttaattaactaaagtgctgcagggaacagcctgctgctgtccttgtggttatagtgtgtcttcctaagattgcctgcctcatggaaagaaaggagacaggctgctctgaactactgctgttgacgtgagagtgatgggaccagaaactgttttgcttaactttcccttagcttaccttgcaggctgggcccaaagatgacctcttttcttgaggccctgtattattatttttttttgagggggttggcaatttttgattaagatgagagggctgtaggtctctgttcaaataatttatgtagcaccctcaaggaggtgaactataacttcccgctccttaagtgtgggctgtacatagtcacttccttcctaagagcatagtttagagatacggaaatgtttacattggagaaacatgaagaacactacttcagccagatgatcaaggttaacttctagagtcatatggcatgttgatagtatgtacccttggtgtgatgtgattaaatgacactttatctctgtggccttcttactaagaaccaatagcacagcgtaatcatgagaaaagcatcagacaaattccaactgaggaatagtctacacaatatcccattagtactcttcaaaactgtcagactcatcaaaaacaaggaaagtctgggaaactgtcacaaccaaagggagctaaggagaaaagacaactaaatgtaaaggggtattctggaacagagaaagaacattgaataaaactaaggaaatctcaggtgtggactttggttaataacagcgcttcaacattggtttattgaaacaaatgtaccatactatgtaaaatgttagtaacaaggatggaggagtatatgggaactctgtactagctttgcaatgttctataaatctaacattgctttaaaatagatatttaaaaacaaaaccaaaaagttcaccactcctggctagttgacccttgcattagttttgatttggggctatctgcagtgtttctccacagcttagtaaatcaagttgattttgctataattgatttcaagaaaatattatgtttagtctcatgttcttttaaaagtgtattaaaggcagggaagtatattttagaattttttttttatcaagactagtcttatttttaaaagatttatttaaaaagaatatgtgaaaattgtgaaatggtcagatttgtgtggggtggtatagagaatagagtggaaaggagactgggggccattgggaagaacagttgagttttaaaaaggagaaacggcaggacaaattgaatgtggacataagaagagaggaaagagtctagaatgattccctggtttctgagtagaatggctgattaaatggtaagaagggtaatcaagatcaagaatataggaggagcccgggtgcggtggctcacgcctgtaatcccagcactttgggaggcccaggtgggtggatcacgaggtcaggagttcaagaccggcctggccaagatggtgaaaccctgtctctactaaaaatacacataaaaaattagccgggcctggtggtgggcacctgtaatcccagctactcgggaggctgaggcagagaattgcttgaacctgggaggtggaggttgcagtgagccgagattgagctactgcactccagcctgggcaacacagcaagactccatctcaagaaaaaaaaaaaaatatatatatatatatccacacacacacacacacacacacacacacacacacacaaacacacacgaggagtattgggaaagaggagggggcaaagaggtatttgtactatgtttgagtatacatctataatcttagagttgtcataatactattatattgaagagtttcaaaaacgtttttagattgggcatggtgggtcatgcttgtaatcccagcactttgggaggctaaggcaggtggatggcttaagctcaggagttcaagaccagcctgggctgttacatggtgaaaccccgcctctacaaaaaatacaaaaaaattagctgggcttggtggcatgtacccatactcccagctactcgggaggctaaggcaggaggatcatttgagcctgggaggttgaaactgcagtgaactctgatcgtgccactaactgcacgctagcctgggcaacagagagaaactttgtctcagaaaaaaacaaaaggttttttttttttttttttgagatggagtctcgctcagtcgcctgggctggagtgcagtggctcgatctccactcactgcaagctccacctcctgcgttcacgccattctcctaaaaacaaaaagtttttaatcaagctaatatatgtacatagttaagtcaaatgttactacaaaacttataatgaaagagaaatgtcttctgcgtcatccctccttaccccttttttgtcccgaccaacaacttggaacttatcctgtaatttcttaatttatcaattataggcatctagtgatttcatgttatggaaaatgaagatttaaaactaataccctctgttactaccattcctttcaacatgattatatcacaatttttgtttaaattaatgacaagtatttacattattatttttacattttgtttttaataaaacgtttttccacttttcacatgatttaatacttgtatcttttaaattttccagaactgtttacccctgtaaattttgtttctcacatgctcaaatgtgtagggtaagagataatgtatggcattaacatcatgactatccaaacatcagtagtataatgtcgtaccaatactttttcccattgagaatctcaaagtctatacaatatctagtattttattttaatttatggaatgaggaggactaaaatccttactagtgactgaaaacaaaagcagaaaaccttagtcttctatgaagcccatgaatgggatttaggagtttgtagactcacccaaaattgtattaataggtaaagattttgacatgcatttctctggaggagagcctatagctttccaaagaagcctgttatccccaaacagtgattgttactcagttacagccatggaaggggctctgtaagctgtgattctcagtatactttgggttcataaacctgtttaaaaagtctaataaaaggccgggcgcagtggctcacgcctgtaatcccagcactttaggaggccgaggcgggtggatcacaaggtcaggagatctagaccatcctggctaacacggtgaaaccccatctctactgaaaatacaaaaaattagccgggcatggtggcaggcgcctatagtcccagctactcgggaggctgaggcaggagaatgacatgaacccaggaggcagagcttgcagtgagctgagatcgtgccactgcactccagcctggtcgacagagcgagactccgtctcaggaaaacaaacagacaaacaaaagtctaataaaagtttccaaatgatttaagtgtaattttagaggttcttcaatcctccacaacccattctcagacttcttgaacttagttctgctcttcggtggttggagtttaaatctttaattctcttttgtataactttctcttttttgctttgaaaatactttattactgatttttaaattttaaatattaaattataatggccattttgtgtgttttgctccagacttggtttaccacttctaaatgacatatgtcaagttttaactttgcaattcatgataaccagctacacaataatcgtcagctaagatggttcagcatatatagtgtattaattatcacagtttttcctacttctaaaaattattatctggctgttcttcattaactctttcattaataaatactgttgatactgaacctgagaggttccccaaagccaaagtggtgccctcattagggtatatttcttttctctttggttttttcctcttaggtttcctccttgtagcacttccattctgttttgattctatttcccagatagtaatagtgtgtctacctctcaaaatatcaaaaagctagctgggcatggtggcatgtacctgtagtctctgtcaaggccagcctgggcaacatagcaagacctcatctcttaaaaaaaaaattaaattaaagctgcacatttgagattagaaaagtagaatttctatttgtctctaagagcatttttttctttaaagaggagtatcttcatttgattgcaaacttttcttttgagtatatcaaattatgcaaatatagaaataatgtgaatttaactttcagtgcaatgcgtgttttactatctaaattaccaagaccatggattgtggatgagaagaaagatgatggttatactgccttacatctggctgcccttaataatcacgtagaagtggctgaactgttggtacatcaggtaagaaaagagttaaataattccctcttttttatttttttttaaacaatttgggaccattgccattcatttatttattgctttataaattgcctattagtaggttccagtaaaacctcatgatgatgaaaattcagatataatgcatattctgtcttctgcctaatacttcttaaatgcaggatggtgatgtgtgtttgagagtgagtccctcaattcccaggatttcctctgcacagtcttcctggattggtcctgtgaaatgggcatcaactaacagagatttcccagaatggctgccactgttacggaagtatcatcaaccagagcaccaagaaccatctgtgttgatacttaaacagtatggccagttgtcatcagactgcagtttgcagctaagatcaggggatttatttcgtaactactgctgacccctggaatttatggctcgatagcagtacagactcaccttggtcatttcattcatctcagaataggatgacactacgtttttatgagcctggattttgggaggagcctattttgtagttttaggatattttagtaatttcagcaaatttttcatgtgcaagcataaaccatatagatgcactgaagttatcaaagaattatctgtgattcctgacttcaaggaatttatagtctagttaagaagatgaaacagcagaaaaatttagcaaataatatatgtaatcaaataccaaattataaggtatacattccaaaaactacagaaatttaaagaaatatatcaaaagttaagccacctcccccccactactttaaatctttgctattaaaattactgctctctgttaattatgataattcctttttattcaaaaatctaagtgaacttatgccactatcatgttgccttggttattgttgccttatagaaagtcttgaaatcaggtagattaaatcctctttctttgtctttctcaggattactctaatgttctagatcttttgcatttgcatataattttttgtttgcttttgagactgggtctcactctgtcacccaggctggagtacagtggcacaatcatggctcactgcagccttgacctcccaggctcaagcagtcctcctgcctcccaagtagctgggactgtaggcatgtgccaccatgcctggcttttatttatttattttttctgtaagacaaggtctcactatgttgccgaagctggtttcaaactcctgggctcaagtgatccttttgcctcagcctcccaaagtgccaccatgccttgtccatataaattttagaatcagcttattagtttctattaaaaagtctgttgggagtttgattgctcttgcacatattagatttgttcttcagcagctttttgcggatgttattataaattgtattttagctggatgtggtagcacacccctgtaatgccagctactcaggaggctgaagcaggaggattgcttgagcccagcagtttgagttacagtgagctatgattacaccactgcattctggcctgggcaacagagcgagacccagtcaatcaatgagtcactcaatagaattgtttttacatttcaatttccatttgcatattgctagtatatataaatacaatttttgtatattttccatatatcctgtgaccttgcttaaacttattctggtatcttctctacagattacttagtattttctatatagcaatcatacaaactaaaagaataaaaaatgcagaagtagaaccacacatatgtataaacagcaactcaaattaagaaaaaaaagaaccacacatatagtcaattactttttttatagaagtgccaaagtaatatgggaaaggattgtttcccacaaatagggctaaaccaagtagatatccgtataccaaaaacaaaaaaacccaaacaaaaaaaccttaactttacttcacaacttacgcaaaaattaaatgagttatagacctgaatgtaaaagcttaaaccataaagccagccaggcctgttgactcatgcctgtaatcccagcactttaggaggctgaggcaggagaatagctcaaatctaggagttcgagaccagcctgggcaacattgtgagatctcatctctactgtatatatatatatatatatatatatatatatatatatatttttttttttttttaattagctgggtgtggtggcatgtgcctgtgtcccaggtacttgggaggctgagatgggaggatcacttgagcctgggaggttgaggcttcagagagccatgatggcgccactgcactccagcctgggcaacagagcaagaccttgtcttaaaaataaaacaaaaaacaaacacaaaaaattagtattagtatattatctgacaatgaggtgcacaaaggtttttaggagacagaaagccataatcttaaaagaaaaattaataaataacacttcatcaaaaactaaacttctgctcatcaaaagataccattaagaaaacaaataggaaagccacagtagggagaacatatttgacaaaggactggaatccagaactctgaaaatttaataataaaaggactggctgggtgcggtggctcatgcctgtaatccaagcactttgggaggctgagacgggtagatcacttgaggtcaggagtttgataccagcctggccaacatcgtgaaaccccttctctactaaaaatgcaaaaattagccaggcgtggtggcacgcacctgtagtccccagctactcaggaagctgaagcaggagaattgcttgaacccagcaagtagaggttgcagtgagccagcatcatgccactgcatgccagcctgggtgaagagggagtgagacaccatctccaaaataaatgaataaataaaaggacaaataactctataaaaatggtcaaaagatttaaacatccactttactaaaggagatatacagttagcaaataggcaagtgaaagcattattagtgattaacaaaatagaaattataaccacaaccagttactacaattgcccacttagaatgactaaaattaaaagaccaataaaaccaagtattggttaggatgtggaacaattagaatttgtatacattgctggtgttttttttttaaagcaggcactttgaaaaacaaattggtggtttcttacaaagtttgacatatatttatcatgtgactcagctatcccacttctaggtatgtacccaagagaacataggacacctttccaagcaaatacttgtactaaatgtttgtagcagctattattagccccatactggaagcgaagccaaatgttcaggtagtgctgggataaacaaattgtgcaaattgtggtgcacctatgcaatgaatactacttagtgaaatgtcaatgatggaaaagctcaggaaacttaaagaaaaatccccattgtgcacatttatgtgagaaatagacatgataaagaattaagctgacactcggaaggctaaggcaggagtattccttaagcccaggagtttgaggctgcagtgagctatgtgccactgcactccagcctgggtgacagagtgagaccctatctcaaaaaaaaaaaaaaaaaaaaaaaaaaagaagaaaagaagctgagatcaggtaccttctgaccacacttcaaagaaacataataaaaacaaatgagaaattcccatcttgaagaatatgacataacattaccaaagtttcagctctgcataccccgccagtatcaagagttgtaaccagagggcatgcatggttctaagacctaaacgaaatgatcggtttatcttttgaatctttagctcttttcttgatctcattttaaaaaatttttaaattatgctagacatttgctaggcattttcatatgttattttacttaatcttcacattagccctgtgaaataggttttaactgtcaccattttggagctgaggaagtagatgatggagttttgacctaggtcccctgactcccaagtgcacttattttgctcctcagtctctttcttcattagggttcagctgttctcatacggttcttcagctgccctaggttcttgggtaggattttctgcttactttaatgcataattttatgtacgaattaagcattaccttctcacctaaagcaaactttcttttcacagagtgaggaagagctcaaatatgcagcaaggggaagtgaacttattaggtcattaaagtaaatctaaatccagtatgaagactcattattataacttttcaggaaatatttagagttctaaggagttgattatctccattgctttatagtggagattgaaagagatctgtctttgaactctactgtgctttgtcctttttaactgttcttgggtggaattaccataataaaaatgatttttaaaacttgctgttttacttcagaaagtttgttgccccatccatttttttctactttaacagcaactgttaccatatgagaataacattgcagcagctgaaggagaaagtagccagcagtgttcggtgttatttattccttatgagtagttatagttttcatgttctttactgttgtcaaattttaaccatttaacatttgttcttctcgttcagggtaatgcaaacctggatatccagaatgtgaaccaacaaactgccctacaccttgctgttgaacgacagcatacccagattgttagggtaaagtattgacatacattttagcttataattacattttaaccatacagatttttagaacttcctgaaaattgaaatgatacagtgttacatgtctcaagctggcatagttagatataagtaaatctaaatatctaaatacaatgtgatctgccaagacagatgagaccatatgcttgagattggcttctatatatagatggtacttttctaaagctcttcagtaagtatcgtagaagggattaggaaaattgttaaagcaccataagcaaagttttaataaacttatatttactgcttaagtaatctattgaaatatgtcaactgtgcatttttatttagggggttgtagtttagcaaacactgttcgtatttattgttatttgaaattcctcttgatatcctccatggctttcttcatgaccatacatttggagaaaattgaccaaaagagaatggaatcaataataacagttccttgtttgtttacataatagaagaattttgaacattatgatttggtcctggtggaagtgcttaaaatatctcaagtcatacatctaaagttgaaaagagaaataaagtcctaaatatccctccgttatcatcatcttagagtagatgaattaagcaacatattgattctcatatatttttattttctctaattcaatatatttaaataaccagaacacgtgactctttgtaaggagccacagggttggagaagagtagaaggcaaaagcataaaaatgattagctttagtggtaacttcttcagtaggtccagggtgttctcaccattactttagatatgttgaagtttcttatggatgtggacactttgccaaaatgagacatctttctcttttagcttttggtccgtgcaggtgccaagcttgatattcaggataaggatggggatactcctttgcatgaagctctaaggcatcacactttgtctcagctacgtcagctccaagatatgcaagatgtggggaaggtggatgctgcctgggagccatccaaaaacacggtgagtaaagatcatctttcattcagtaccagtggaagaatcttttcatgcaagatcttatatttactggtaatctaacctgtattggataaaatattttatcagagctatgtacttagaaacttagtttatgaacttagtactagtcagtactaacttattgctccacatttttaccaaaagttgttcagttctgttgttgttgttgttgttatgtggagtcccactctgtcacccaggctggagtgcttggctcactgcaaccacctgggtttaagccattctcttgcctcaacctcccaagtagctgggattataggcgcctgcaccacacctagctaatttttgtatttttagtagagacggagtttcaccatgttggtcaggctggtctcgaactcctgacctcaggtgatccacccgcctcggtctcccacagtgctgggattacaggcctgagccactgcgcccagccattcagttcttttttaacatcagccattcaaatagatacgtagtggtatcttattgtggtttaatttgcattttcctaatgactattgatattgagcatcttttcatttgtctgtcaccatatgtattttatgaagtgtctgctcaaatcttttgttcattattttgttaggctgtttgttttcttactactgagttttgagagttctttatgtaatcggaatacaagttctttatatgtgaatgcacatattttctcccagttggtaggagatttgtcttttcattcttttttttttttgagatggagtctcgctctgtcgcccaggctggagtgcagtggcacaatcttggctcactgcaacctccgcctcctgggttcaagtaattctcctgcctcagcctcccaagtagctgggactacaggtgcatgccaccacgcccagctaattttttgtattgtttttagtggagacggggtttcaccttagccagggtggtcttgatctcctgacctcgtgatctgcctgcctcagcctcccaaagtgctgggattacaggcatgagccaccacacccagcccttttcattcttctaatagtgatttggaagagtcaaattttttaattttgaggaagtctaatttatcaagtttttctttcatcatttgtgttttttgtgtgtgttctgtctgagatatctttgccaaacccaagatcgctaaggttttcttttatgttttgtactagaagtttataaagttttagctgttatgtttaggtctatgattctttttgagttaatttgtatatattgtgtgacatatggatccaggtttatttacttgtggatatccagttgttccagtgccattagttgaaaagactttgtttcttttcttttttcttttttttgagacagagtcttgcactgttgcctgggctggagtgcaatggtgtgatcttggcacactgcaacctctgcctcctggggtcacgcgattctcctgcctcagcctcccaagtagctggcattgcaggtgcacaccaccacacctggctaattttttgtatttttagtagagacaaggtttcactatgttggccagactggtcccgaactcctgacctcatgatccgtctgcttcagcctcccaaagtcctgggattacaggcatgagccaccacactcggctgaaaagactttctttttctactgaattgccagtatacttttatccaaaatcagttaattgtttatgtgaaggtctctttctggatcatgtattctgttctgttggtctatgtttttagctatttgataccagcccccagtcttaattactgtctacataatacgtgttgaagtcaggtagtgtcagtcctccagttttcttgttttttcgaagttatttgactattctaagtccttcacatttccataagaattttaaaatcattttttagagggtaaaaaggttctgagaccaaagtgtttgagacctctgccttatttatgaccatgggtaagttctcttagctcggtgtgcctctttttttctcattttaaaatgggaagaggagagcacttacctcgataaggttgttgtaaagatcatggaaagtgtgtaaaataatacttgatccattttagacactcaataaatgttaacagttattgtgactattttcacataagatgatgagaagaatctcagataatattatcagaacctaatttgtctcattctccgtatcttggctcaattcctagtcattggttcttttctcagttgtctctcctgtcattgtttcaagttggttgctagctgctccagagccaaattaattaggaaagagagtactgtttctttagtatctcaatcagaagttccacttttgagttctgttgggcttaattgacttgatttgtgttatgtgtccatcccggttctagccatataggtaaggtagaggtatctgactggtttgggccatgtttggtccacctctgcagctggagaatgtaggtccacctctacaactggagaaagcatacttgtgtgtatgcttgagaaaaccaggggtagagtggtggggagggaacattaggactagaactcataagtgtccaccacacacacatacatatatatgatgacaagaattgatggcagattcctagagggaaaatcatgactctttattttattgcagttaataatgggacttggtacccagggggcagagaagaagagtgcagcatctattgcctgtttcttggcagccaatggtgctgacctgagcattcgaaataagaagggtcaatcgccacttgatctctgtcctgatccgaatctctgcaaagcactggcaaagtgtcataaggaaaaagtcaggtttgtattatttattatcataaaacttaatattctgtacagaaaatatcatgtggtttcgtaatggaggacgtggctacttgaaaatgtcttcatctttgctcttcctgtatatttgtgttgaccctttctttcctgaaatttttcttccttgaaaatttttctgcaggcagcatgtctcttattttatgccatattccccacattattgagtgcaatgctctatacttaataagttctgagaaacttttctaaactagtctgatcttctagtactcccatgtgttagagggatttatgagaaaaagtcttctagtaaaattgctgttgttaatgttacatgtattttaaattgtatttattttttattgtattattattattttttaaaaatacgtcttgctgtgttgcccaggttgggcttaaactcctgggctcaagcaatcctcttgcttcatcctcagtagctgggactgtatgcatgtgccactgtgcctggctctatatttaaaatttaaatagaatcttcctaagacaggcaacttatactccatgaacagggtatatctcacacaaactgtagcaccctgctcagtgcctgacaggtgcactcagtatcagtggagaatgaacaaatgaatgcaccaagtcctggtggagttttctctaaagatgatcatttcacatttgtctctttttctgaaagatatgtcagtgattttaattattatttatgacataactaatttccttatgagattttatagatgtacaaaaaggtacacatctcattgcttttttaaatctgaacagtgctgtgcaactgttgttgccctttgtacctggttcttgtcactgaaatttcagtagctgttccttaaccttagtgttccttgcctctctcataatttatgtgtagtgatgaaatgtcatctctttggaatctgtgcatagaactgtgttatagaggaaattaatatagtgaggtatatacatttctttaagtgtattgttaaggaacatgaaattctattacaaaaagagaatgcatcggccgggcgtggtggctcacacctgtaatctgagcactttgggaggccgaggcaggtggattgaggtcaggagttcaagaccagcctgactaacatggtgagaccctgtctctactaaaaatacaaaaactagctgggcgcatgcctataatcccagctacttgggaggctgaggcaggagaattgcttgaaccgggaggcggaggttgcagcagtgagccgagatcacaccactgtactccagcctgggcaacaagagcaaaattctgtctccaaaaaaaaaaatctataaatataaagatataaggcactataattattgcagtaataacttttaaacaatggagtctaaggtggaccctctgtgtacgtgttgtgtacgtgttcgtgagtttctgaagattgtggtagaaacagggcatcccttttctgtagctgtaggtggtcatatgtatttctgttccttgtatctgtgtttacggatgcagtctatctttctgtaatataattttatgttccttaaggatacacttaaaaatgtcaaaacagcagctgaagtgttaaattttccaaagtgccctatctgttgtggactctgatgatgctttgttccgtctttagtaaggcaactaacatgggggctagtgaggatttttgttttattcctatgccttcctctgctggttctatatagatacaacaggttctgagcaaaattttgtttatgctaagttttttttttaattgctgttttttatttcattgttagaagattcacccttttccattgggtgagtgagtgttcagtttgaagtttgaattgtgttagaagtatctaaagatgcagagacgcatataaacacaaaaatttaatgtttcacatacagatgttaaagcttaattttttaatatgactagtttttatgtatactaatgatgctccaggtatattttaaaacattttaattagtgaatttgtaataagataggcttgatttgaaatactttcttttattagtggtcaagtgggttctcggagtccttctatgattagtaatgattctgaaaccttagaagagtgtatggtgtgctcagatatgaagagagatactctttttggtccatgtggacatattgctacctgttctttatgttctccacgtgtcaagaaatgcctcatctgtaaagaacaggttcaatccaggacaaaggtaagatatatttaatatagtattttgtcattttatgaagttgagactagaattaatgataaataagatttaatgacatcatgcgtctgtgtaattttgctcttccaaacaatgatttaaatataggaatatataatttctgcatttatcagatcagaatttcttattttattgcttgtttacagtcttgcttattaatgtactgatttgctaagttaattattgtttgagtttattgatacaccatttttactgtcaaatttttttagctcttaatgtgtttccttcattatatctaaagtatggtaaagttaaaattatctaccattttgctttcaaagctccctataacctaaggatacatttacttccactttggattatagttacttatatgttgcactttttttggagtacaaaaactgttttgcattcatgtttgtaaaataattcatttttttggtagaatgtcacacattctagatttgattgttctatcgtggtgttgtttaacttgctatcttctgtgtttcctgtaagctggaagttagatgtaatagtttgatcagggtcagcttaacatttttggcaagaaagcttcacagttggtgccacacactttacattatgtcccatctggaggcaaataaagtcttgtctccctgtaattagtgatggccaaaatctatatctactctgaactttttctctctcctgactccttttgctttttgagaagtatagttcttttctgagtaacttagtgctttattataactgtaccagattactaattttggtttactgaaataatttattttttagtttttcaatactcaaatgtgtgtgtgtattgcatataaagtgaaatttgagtttcttacaaatgtttctctcaaggtgaatagtttaaaccaaagagcatgttggttttgaagtaaaaactcatggagtttatactctttttccattcccttctttttataatctttatttctgtcttgctatttattttttcttaagctattcattaaccatcattaataagaaaggagctgttagtaattatcataatgaattagctggcagggacttaaaaggtgttgccttgcccctgcttcttctactttcaaccttctaagcctggatggtttttatgatccaaattaatgtatctttcgtagaatttttggcacaggaaaaagcacaaggaagttatttttgataggaatactggagtgcttgtatgtatgtagctgcttgatcaattcataaagctgagaagggtgaactaatagcacttattgtgtgccagacactgtgttggcatttcatttgtattaaataggtgttaaccctgcttaataaattaatgtggatcattctacttagcatttataattcgctttagctacctgtttacgaagtaatagtttgggaaagaatacaaaagaagaacaaaaatttaagccattcttttgtctttagattgatctgtgtattctgccattgtgtttgaaactttttgttagattaagccctatttcaacaaacctttattgaacatctgttttatagtcaagacaaagatgtatataataattacctgctaaaaatgtgtaatctattggtaaactatgacttatatataagcaactctgccatattgggtgttgtaggtgctttaagagagttaaaaactgagtaggagttcagagcctctggttgtcagaagcagagtctcagctatgaagttattcttataaaagctgcagctcaaagaaatggactgacatctggttcttgaatgcaggtctcttgattcttaagcccctgttcttttcactgtgttatgatgcatagacaaaattaagaacgatgtctgcaagggatagttgatggaacagaggagagaggaaagaggaaagaatatgctttcgttctttttcagaccttttgaatatagttattctgagaattaataggcttgcaatttgatttttaaattatgaaagttttataatttataatcttataaatttataatctatagaaaagtagaaaaactacggatatacccacccaacagatttgccaggttggttgtagagcctttgactacgaagaaatagtgaccccaagtggttaaaggataatgaatgtcttcattgaagaaaaacaaattacagtatttggagggaggtataaacaagcatgggatccttttctgttagagaaatacaaagaaggaaattaattgaattaacatgaactatttcagttgaagtagcaaaaatacattttaaaaagtgctagcaaggaaaatggcaaacaggcactctctaaacactgctggaggctaggtggccaacccggctatatgtacagacattacacaatatgctttggtttagtaactccactcctggaagtataacctgaggaaataattggaggaaaaggtatggctacagtttttttttcttataatagcggaataggtacagatatggtttttagatcagtttgctgtattattttaaactcttcagaaacaattcagacaaaaagacaaatgcaatggaaatcattttaaaaatcaacatgttatatagaaaggagaagataattattatgtattaggcactgattttatatattacacattgaactactttatacatatctgatttactctttatcactctgtgaaggattattctttattgtttagataaataatgttgtagctcaacaatgttaggtaatttgttggtgttggaggtagattttgaatccaggaatgtcagtgtcttgatcaactatgtcttactgcattctgcattctgctttttctatacttacataaattctatgtacatactgaggtgtaagttgggaaagtccatagagagaaagagagagagcacacgtgcatgtatttggttgtttggatgatgctgtaggtgagtagtagttaccatttttggtgacacaagagatggctaaatgtgactgtgtgttagaagggagaataggtgaaagacagatgagtagccaagggctatggggtagggatacaggaagccagagccaaggtggttaatagttaaatgtccaagctcagattaagtggacatgaagaagaggtgaaagtgagggagattatgaataggctgtggaagtcttgctagagatcagggaaaaagaatagcccaaagctgtgggcttcaggcagcatgggaattgaccaagtcctggaaaagggcactttaaggtagagtttcttaaatgtgggtaaacagaaaaatccctcgtggattttagcaatttggctaatctagctagatttttattaatattagaaatctgtctttcagtcatttcttattttactactttatttgttcgttgtcttttttagtttcccctcaaaagtagtttttgggggaaaaaaatattgaagcctccagaggcttcctcagaggaaatggagttttttctattctatattttaggacagatagggagatgaaggtagaatagaaataagtgcctgttaagctagggtatataaagatgtgaaaatgaataaccaggaaagtagaggatgggaggaaagtgtgtgttaaatttctctgtgcctaggtgttttcttacagaggaaatacatttggatataattgaacttgttaagagttactagatttatctgtaaatggtcactgtgctgtaacctctttttctatagattgaagaatgtgtggtatgctctgacaagaaagcagctgttctttttcaaccctgtggccacatgtgtgcttgtgagagtaagtagcctatgcagagttcctcaatattattataaaaatagaaagtgaaacaaaaattatgtttttgagggtttttttgcttttgattttggataactcataaaaaagttgatgggcctcgagtaccttctatttctttctctgtactagaacgtcagctgtttccctccatgcgtctgagcattagggaagactgaatatgctgtgttctgccaccttggattttgatttcagttgtattagcacaaaagggtctctttccacacataatagaaatttattttgaaaaataaatgttgaaacatttagtctcgcctttgttcacatatgaaattagcacgtcttcatttggcttcaccttaatattgcctctcctgtgtactttcctcactgcagaagaaccaacagcaaccatttctggggctgtaatttctggccttctgtaagcttttatgtcaagagagcttttagaaatcttttctttgtgagggcagtattaaaatttaaaaaatgtttttaagtttcttttaaacatattctcttgaagtcctttgcttttcatattgcccttgttcaagttcatacactgttaaatattctcttccctttgcttttcttcattttgtcaataaaagattttattttattttattttttatttttggcacagtctcgctctgtcacctaggctggagtgcagtggcacaatctcggctcactgcaacctctgccttcccaattcaagtgattctcgtgtcctccgcctaggcaacagactgagactcagtcttaaaaaaaaaaaaaaaaaaaaaaaaattccaataggcagctggtcaactaaagaaagggtgaacgttttcttctgtaacattttgcctaaagtgactgtttctgtttaccaaagagtggtataatggctattacccaatactatcaaaagggcacatagagaattctctgtcttaagtaaaaaaggactcaggttacttaagttttcataggccagaggttggcagacattttttgtaaagggtgaaatagtaaatatttttggctttgtaggccacatggtttctgtagtaaccactcagctctttcccactgctgtactctgcactatagtgcaaaaacaaccatggaaaatatgtaaataaatgggcctgactgtgttcaataaaactggtctcataaaagcagatgacacgtcagatttggccctcaggtgtagtttgctgacatctgtcattcaccaaagtgatacctacatgagacttgaaagatgattataattattagttgttcacacagattctagagccttaatataatatttccccccaggagcttccagaattttttacatggcgtttgctccttttttttttttttttttttttttaattaaaaaagcttcagctttaaatttagctttctgactctgggcttgtgccttcaacattttcacgacgacattctgctctttgaaaggaaagcatgcttggtcctgtcgtggatacatttagcagtcatggaaacaccattggtcgtgctgacactttttaaaattttagacaacctcacaagaacttgaggtctcacagcataaatcccttgaagtctgcctgggcacacgccacatgcagacattggtgctttccctaccttcttgatataaaggtaaacaataccagggtttgggacagcctagttttgttagatgctgtgttgtagaaaagcctatgatggtgcgtcaaacactggatcatgctgagtgcctctagatagcatctctggaagaggaaaaacagtctttgctttaaaatgcatttaataacgagagcaacaccaacttttattgagctcttaattctgtaccaggcattttaatctctttttgagtatttcctcatttattttcagaacaatcctaagaagtagatggttttcttgattttatagacatgctcttaaacatttatttgctaacggagatgaaactgaggtggaacatatgcctttcccaaggagtatacagtaatgtagttcgtccagtacccccatcgcagtcatgttaggcggtgaaagtgccttggcaagccaaaggaaggagagattacatcccttttggaggtgctgaagaaagattagaaacaatacagatagaaacaacacaaatagagaagatagaagcaaagatagaaacaatacaataactgaactaaacagttaattttagataattgtgtttatgtattatatatttagtcaattagtcctttatgtttaagaaaaaaatctgccttcaaattgaagacaaatcccaaaccagatttctacttaacgttggctcctacctagtgcacttgtataaccgagcgtcagacccatttatgtttaggctttggcaagaggtcagccttggtaactgactgttctccatccagcagtgtgcatggcaaactattaggagtgtaggccctactttgtccacatcagtggttttgtgctttgttcaaatctagtggtttgccataacctggatattctgccatggttcccattatttttcccatttttgaaatgaacaagacacttgatatgtaggctaagatatggaatatattttcataatgaatgttaatgagaaagaatatgttgaattgctgtgtgttattttataattaattaacaagtttagatgtaaggtagtattaacaatcataacagggccgggcgcggtggctcacgcctgtaatcccagcactttgggaggccgaagcgggtggatcatgaggtcaggagatcgagaccatcctggctaacaaggtgaaaccccgtctctactaaaaatacaaaaaattagccgggcgcggtggcgggcgcctgtagtcccagctactcgggaggctgaggcaggagaatggcgtgaacccgggaagcggagcttgcagtgagctgagattgcgccactgcagtccgcagtccggcctgggcgacagagcgagactccgtctcaaaaaaaaaacaaaaaacaaaaaacaaaacaaaacaaaaaaaaaacaatcataacaacatacagttgtgcctagatatttcttattggaataggaatgcattcttctgaaatattgtttatagcctttgtaaatcaaatattagaaagatagtcttttatgaaaattaaatttttttcctgaactgctatattaaaaaagtaatcactaagcaatttccttgttacattgcatcaatttgataagagaaggaaataattgttcattgtattttagcgaaaagccatttacaaaagaaaatgtttttagaaaattatcatgtccgggggtgttgggcagggggagagagagcattaggacaaatagctaatgcctgcagggcctaaaacctagatgacaggttgataggtgcagcaaaccaccatggcacacttgtacctatgtaacaaacctgcacgttccgcacatgtatcccagagcttaaagtaaaataaaaataaagaaatataaagaaaattatcacgtaagcaagcttataattctagtattagttgacatttgtcaatagtatctctctcctttattctcaagtcttaaaatcttgaaatatttattgtgtcacttatttctttaaaaaacaaatttcacagtttattcagctgtattggaaaatgtcattgttttcataatgatgggctctctattctggaggctaccgatggagaatactcattcttaggttgataacattttaaggaggtagaattgcatattgctataacttgtataacatttatttcagtgtgaaatttaagtcataaaaattagcagagaaaggcaacactcctattaatgttctctcttgtaagaagtgtctgtgttaccgttttccagactgtgctaacctgatgaaaaagtgtgtgcagtgtcgagcagtagttgaacgaagagtgcctttcattatgtgctgtggagggaaaagttcagaagatgccactgatgatatctgtaagtcgattgtcttaagcattttcatattttgcttttttttgggacttgcataaacacctcttctctttcgtaatacactactgccttataaaacctaagatgtctgacttggatccacagtggaacaggtattgttttctggtgctcttattatattataagaaacctgaagttctatttttgtgtgattatggaactgtgaacatcagtcttctgagaaacctgcatgtatgctataaagaatattgttgtgttcttgcataaagaaaatttgtgctctatttttaagatgaaatttagtgtgttttgtcaaggggtgggacaccatattacaatttatttttcagtttactgaaagtattaacctgcttccattatgcaacaggtttatttgcttcatttaagtattttatggaatggtaattatttgggacagagtaactataggtaaacaaaaatgtaacagtgaaagggtggaaaaatgaaaaataaatgatttaccctcaacattttcaatagtacagttgtttcaaagtattttttctctttgcattagatattagctgaatggtttctttgatttctttgttctctgaacatgttttatgagcagatgaggaagagcattagtgtgtagcaacttctgtctgaggcttttgtctttatcacaaatagaacagaataataaaaatctcagggacagattaactagaataaaagaccaagaatctagagaataggaaaagtgaaatcaaagatttccctccatgtttgcatactacagatgatggcctttcttgagttcctcatctcagatcagtaataacgaggaagtttagtcataaagaaaggaggctagatttgtgtacgtcctcataaaaatcatctgagagactttaaaataattattgctgccaaagctgaccaaagccctgctggttactttcttggttcatatggtacaggagcagaggaagcaagcataaaatgtattgatgagcttgccaaaggaagcacgtagagccttggaaaacccagaagtctgtgtctggattgtgctctggctgagataaatataattagaaattaatgtgcaaactgtttctttttggagttcataaatggaaaagtgtaacagaacgtcactactgtatgttgtccaagtgtgagaaaaatttttgaagaggattttaataatagttttatgtttttaataaacaaaacagtaatattttattttataaatgtcattctgtcaaagcaataataactgaaaatctttttaaatctatattatagcaagtgggaatattccagtattacaaaaggacaaggataataccaatgtcaatgcagatgtgcaaaagttgcagcaacagttacaagacattaaagagcaggtaataatgatttcatgtaaacagtgatgctgtgaatggcactgaatattttcccgtaaaactactagtgtttctgtaataagtatggtttatattagtgtatcacttgtattatttgcatatttgcaatgagtaataatctgattagagggtttaatcaggtactttccaaaataggtaacacacaaatggccaatgaatatgaaaaaatggtccaaccacattagtgatcaggaaatgaaaactaaagccacaaggaagttttcataagtattagattgaggaaaatgttaaagactgtcagtatcaaatgttaggcagaatatgtagcagccgtaactcatacactgctggtgggaatatatattagtagaaacacttcggaagacagtttgtcattatctaataaaatggaacaggttattgtttggaatataaacttggaaaaaacccatacagatggtattaaaagttgaaggtagtccaggcgcagtggttcatgcctgcaatctcagcactttgggaggccaatgtaggaggatttcttgagcccaggagttcaagaccagcccgcacaacatagtgagaccgcaactctacaaataagaaattagctgggtgtggtgacctcccaactacttggaggctgaggtgggaggatcacttgaacctgaggatcgaggctgtggtgagctgtgatcacgccattgcactccagcctgggtgacagagtgagaccccatctcaaaaaaaaaaaaaaagtcaaggatagtggttttcttggtaagagatggctgggaaggggcacaagggaagaagggaagtttctagagtctggatgctctgtttcttgatctgagtaccagataaatgaatttgattagtttgtgaacttgtattaaactgtacacttatgagtcatgaacatttctatatacatgtgatactttaatagaaaggggccgggcgtggtggctcatgcctgtaatcccagcactttgggaggctgaggcgagcagatcacttgaggtcaggagttcaagaccagcctggccaacatggcaaaaccccgtctctactaaaaatacaaaaattagccaggcatggtggcgcgcacctgtagtcgcagctactctggtggctgagtcaggagagtcgcttgaacccgggaggtggaggttgcagtgagccgagatcatgccactgcactccagcctgggcgacagagtgagactgtctcaaaaaaaaaaaaaaaaaaaaaaaaaggaaaaatgtgtctgtatacatatacaccataaagaaaagcaggggaaacataatgcaaaattcacaatagtagtcatcagtgggggatacatggaaaggattggggaggatttatagaggggcttcaaaaataagagtaacgttccatactttaacctgggtgttggttatgttgttctttatgtctttttttttttttttttttttttttttagagtctcactctcacccaggctggagtgcagtggcgcaatcttggctcactgaaacctctgcctcccagattcaagtgattctcatgcctcagcttcccaagtagctgggactacaggtgcacaccaccaccctcagcgaatttttatatttttagtagcgatagggatttgccgtgttttccaggctggtcttgaacttctggcctcaagggatctacacaccttggcctcccagagtgctgagattacaggcgtgagtcactgtgcctggctgttctttacgtcttatatatatcaacaaatatgctcttttatttctacctaatatttaataaaagcaacaataagataaaaaaattagcaaaaacttgtaggtttgttatgttaagtaagatagcaagtattttttctttctggccataccttaccatttgaccaagttactaaatctgattcacaggcttgagcagttctttagtttggccaatcacgtcagtattgccatgcagttgttagaatcatcactcctgtgttttctatctgaatttataagaaaataacatagtcagtagttagcggcccaggataactaatgacccttgtgataactaattaagaattggtcagttgcagtgagtgatgtgtacctgtaatcccagctgctcagcatgctgagctgggagaattgcttgagcccaggagtttgagatcagcctgagcaacgtaacaagaccctgtctctacaaaaatttttaaaataaatcagcagactgttatgacacatgcctggagtcctacctacttggggaactgaggcaggaggatgactggggcccaagagtttgaggctgaaatgagctatgacagcgccactacactccatcccagacggcagagtgagaaaccatctctttgtagggggtggagggaaagaattgaatgtatgaatttattaggcatttaaacccccatctgaagagatgaaaactctgattaggccagtttttcttttgaaatccagcatctagcaatactttttatagaatgaataagtgaagatcaatatgaatttaatggttcttaatgtaatttgggacatatttggctagttctaatataaaataaaacatttaatatatctaatacatctaatataatacatctaatataaaataaaaacatttttaaacatttgaagctcctagcatcttgattcctttcccataagacatctacagaataagctgagttttgaacacatcttctataaaaagcattttatattctaattatgaattaaaattgttcttaacatgaatagtgacatttattgaaccctatatggatcctaaaagaataattctgctctactatatccaaagtttagcattctacccaagtttatactttcttaaataatcctcatcgccatattttatcactgaagtatttaaacagttttatcaaaactcatcttatgaggaatgatgggatttcttatagggactcccttcaaggttattaaaaaaaaaaaacaaacaacaaccagaaaacattcgaataactctgctcatttaaatctccagtctattaccccaatgtgtctttaacagataaaatttaatttaacttggtattaaggatatactaatctcaaagtaaacacaggctgcacagatgtgtctacttttggaaataagagttattcaatattacaaagacctcttgaaaatttaatagacatgaaattattaataacattatcaatctattttgcttttcttttttttttgagacaggatcttactctgtcacccaggcttgagtgcagtggcacaatcatggctcactgcatactgaaactcctgggttcaagcagttctcccacctcagcctcccaagttgctgggactacaggcatgtgctgccacacctggctaatttattattttttgtagagatgatgtctgtgttgcccaggttggtcttgaattcgtgggctcaagtgatcctcttacctcggcctcccaaagtgttgggattacaggcgtgagctaccgcgcctggccggctttttaaaaatctaaaaagatgggattttctatagctttgcttctcaaaactttaagacaaaaatgtgacagtttgctttggaggagtggggctaccaatttaggctacaattccttttacaatgatctctggtattctcaaagttggtaacagttggtaacaacatgtcatataggctttaggcctagttttttaatgaagacatttctttttaattatttcatttccatgttatttgggaaagctataaatcagaagtattatacattaaggcaaatatgattttataaatgtaaaatgtgttttgtgaataaatagtatttcagacatatacctgacatacttttacattctttcaagttcatgaaatttacatttattaatatgtaactaaggctaatttgttttaattcaggggaatctacattgatagtaatacagtgcagcacagtgtctaagagcaagaactttggggccctgagttggttcactctagggcttgctttgaggaaggttttcaatcccgctgagcctcgttttcctcattttccaagtgggaatgataccaggactgagattgtatcctatctaagcatagtgcctgacaagtgttctcagctacttctcagcactgctccccaccctgcaccatgtattgcatgatacattgccttctttttatgcaagagcagctgagtacctagattcagggaatttcagttagactgaatggagctattttcatccatttcctattacgttttggtttatataggtttttttgtttgtttgttttgagacagagtccttgctctgtcgcccaggctggagagcagttgatgcaggatttttctcaacccctttgtcatacttgcgacagaggtgcgctgcttacttggccactgtgctcaactgtttgcgggagggagcacatgaacgagcaattgcaggatccatgcagcggcacccaggtgggggtgcctgcgactccaaagcccctgagggcatgttagagtgctctcttagttctgccgtccacggacagcggtgtgttatcagctcagttggccccttgcctcatagtgtggggtagctgccctccgccagtgagggcaaagggccagtgtaacagccttattttgggtacccacactcggtgtgtcccgagctcttgtccagtgttcaagaagaatgaggtcacctggacacttgaaggatggtgaaggcagagagttttattaagtgatggaaatggctctcagcagagaggggaactggagtgggggtgggacgggtaggtaatcttcccctgaagtccggccatctcttccctgaagttaagccatctctcctccgaagtccagtcatccctttgaagtcaagttgcctctctcccctctactacctgggtctggagtctttaaaggcacaacatgggaggagtgggcagggtgggctgtgggtagttttggaaaaggcaacaatcgattggtaaaaagacattatttagaaagaaccagttgggctgggcgtggtggctcatgcctgtaatcccagcactttgggaggctgaggtgggcagatcacgaggtcagaagatcaagaccatcctgaccaacatggtgaaaccccatctctactaaaaatacaaaaaaattagctgggtgtggtggtgcgcacctgtagtcccagctactcaggaggctgaggcagtagaatcacttgaatccaggaggcggaggttgcagtgagccgagattgcgccactgcactccagcctggcgacagagtgagactccatctcaaaaaaaaagaaagaaagaaccaattgggagagagtgggcaagcaggaatagaagttctcactttggcctgtgggtttcaggcttttcagctcaaaggttgggtttcactggggacccacccttgtctgcctagaatttctctgcctcctgcctctatcacagcggcgcgatcttggcttactgcaatctctgctgcccgcgttcaagtgattctcgcgcctcagcctcttgagtagctgggattacaggtgtgagccagggtgtctggctgtgttttatatattaatagtttttaatcttatgtagtacctttcatactatcctgatagtacaaccagtgtttctattttattttatagggatgacattttaactatttaaaaatgttaaaaaattgtttttaaaaaccaccaaaatattatttgactaaaacaactaaagaaaattaatgatatataacagtctgtcactttccaaatataaagtgtctaatttattactttgttatctcacattacagacaatgtgccctgtgtgtctagatcgtctgaagaatatgattttcctttgtggtcacggaacctgtcaactctgtggagaccgcatgagtgaatgtcctatctgtcgcaaggctattgaacgaaggattcttttgtattaactaagacacatggtgtattttgttagctaatgtatctagtcatgagatcttaataggcttttgatctagttggaagttctgatgagttaatttctaatatcatagtttctttactagagtataattgggctgtaaatgtaccagaacaaaaaaccctacaaaatggtgttggaaattgtgttttttgtttttgttttaaatttgaaacatcaaattcatgtaactcataggataatttacctttggcttctaagaggaaagtcctttaaggatatccttttttaaaaaattgcatttttctcttataatttgtaaatttgttggatctcaaaagacataattctttgtgatcagttatccttcatttcatcgtggttttacacagtgagttgataacaggttctctgagaagtcatgcatcaaataaaagaggcaggtcaaacaattatgtcacatggtaaattataaaatgacagtacaagttccagatagttaagggaataccgaagggatgattctttttttaagataacaggaagttacccacatgtttgtttctgaattcttagagtaaatggaagcatagaatgagggaataatgactttgcatttctcttgttttctagattcaaaaggaacattgtttaacttgaatcagattaccagtttcaaggtgactgatagacaagaaaaggaaaaataagcaataatagtgggcaactgaagagaaaaaaaaaacgagtatctattaactggccactaacagttgcctttcttacattaatttatacactattttgttcagccagtgtttttaaaaaaaatctatgaaaagtgtacttccggttttctgtgattacttatctgggcttgatctgaccagtgaaatgacattgccctatttggacctctgaggttctatttagctttgcagatgtacatagtatcccagtgatctgcaaaattaatgccttttccaagaaaaaatcttttcttctctgtatcagttaattctgacagtgttagtgattctgtcttcattataggccttatttccattatctctttctttatagtattttttgttataaagaaaacagtctttctgtgtatacctacggatgagggtattatttaaactgccaacaatatccaagacatggtcaataacctaattataaatactttagaaagagtgaccaggacatgtatagaaatgtctgcttacctgtagactttaaaaacaaacaaaatttttggagcatttaatcattttttttctccttttatctcctttgtaatcttattgtctcctgagtaaatatacacataaatgtttggggattcattgctgctagattatatcaggtgtttacatagtgtctactatatgctgttgataagctttttcctaaaaatagttatcctcttttgtagtttttttccctcctttaaatctggctagcttttcttacttcagtttttatagaacaccaactaaatttgaaagtatgaagtctctagccctcttacactgtttctggctgtttaatccttgctgcctttgcaagtcctggtgaaagcaatggggagctttgctggctggttttgtagtctcaacaattccatgtctgtgtttagctgagtaactgctatcatttagaacagtaaaatttttatagatttcaaatttgaaaattcatgtacactcagttatctaataaggggccaccgacgctgtttttaaaactattttgaagttataaaaaggtagaacatctgactgatgatgttcacataaagagacagacagactatcatgttgcagacatgaaaacagcatgtcaggtttttcctttccttccatgccatgggctacccatctcttcccactagatcacctggtgaggagggagcacctggctgactcatgcagagtttggccaatcagagaattgtgtggtctccagctctactttccttaaacaaatcctttctgttttctgagctgcagtgctaaaacagatccctaaaaggtaatagcatcttccagactagtttaattatttcctttataagaatatgacataaatttttattatagaaataatgtcattataattttagtgctagtacttgtgggttttctgtatttgtatcaccttgaaatttgttccatgaatagaaaatacttctttattcatgttttcaatcacttagaattattttaaatttattttgggtttgtgagagataataagattaagaacttcatcatttcagtgactttcctccaactctctgaatctgctacctcttattatatgtcccttagcagtacttttccagttaggttcgttaccctgctcattagctaaacctctttatcttgtgcctcaaaagagcttttacttttcttagaaacatttataaaaaagaaaaaaactgacacgcattcattcaaaaaagtatttattgggctttagggattagatacacaacagtggaaaaatggcatcttagcacactcagaatttattgtgcagcagttgtgtattttaaggaatctgtagttaaaaggaagagatccaaaggtcctgataacatttcctaacgtttcagaagagttgtcattgagtagtgtttggatttcctctctgtatccctcaccctaccattttctcctttattcttctaagattgttagcgttgttactcaaaacatacacatacaacataccagatggtgctgttctaatggtatttgttcacgtaatttaacgttcttactgcttatactatatacatatttaattttgttgggagcaagaaggttttcaagaaaagataattttgtattagtgtaggaatatattagacaaatgtttagttggtcaaattatgcataagatatttgtaactttaaacattgcaaattgaccagctagctatggaagcataaaattaattgataattaatgttggaaatacatttctaaaatttatatttttatggtgttagcctgtaagagcattttagcatattgaaatgcatgctgcttaagatgtgtctggttcaaatatcaaaacttgctgggtcatttttacatagtagaaacatactgtctatgtgttgcccaattgctgtttgtccactctgaattctggaccctttttggactaagaattagttaaattcatgaactaagagaattagagatggggtagagtaggatcaggacagtggggttacaacagataggaaaggaaagtcagcatttgagtgtagagaaaaaaagaggatcatacagatgtcatcaaattataggctttaatacaggttgctttttttaatccaaaaggaaaagcacttatcctatcagaatgtctaccatgttttatagtaataatttgtgtaaaaaattgaatttttgaatagttttttgtattttttgtgatgaaaaactcataacataaaatttaccatattaactgtttctaaagaatacagttcagccatgtgaagtacatttacactgttgtgaagcagatctccagaactttttcatcttgcaaaactgaaactccatacccattaaacaactcccctttttgttttctcctcagtggaatagaattttgactccatataaatcaagaaacacctaaattctttagttgtttgtgtttgcaagatctaaggtcatggtaaacattaagttcttaaaatttttgggagggacagtgcacctctcctctgaattgttagcaattaaattgagtaggttttaaatgtctattcattggaagggtttgttatttcattttgagccagaggggagaggcacattttaaatatcagaattagattagctttgagtttgtacaattgggaacataatagattttcataaattatgtgtgccttgttggaagtgtcaactgtctttatgtctgcttgtaaaagtttcaaaatatgttttccctcaaaaaggcaacgttacttcatttgcttgaatattatgataggaatgcttactgatattacttgatagtcatatatagcctaggaaatttaacatatatataactatagcagtattaataatgatagttgtacttctttaaaacattaaatttgaggaaactttaatgctgtctcgtgtacattgctttactacagtgagggggaatatcctttagattgagcctcaatttactggttagtagtatgtgaaactctggtataaaaacgtaaactagacagtagagccgatgaattaaaattgtaaattgctacattggcattttctacctccttttctgtcagagtattactttttccagcatttattcttatttgtgagtaaagaggaaatgggaacctgaggttaaaattgacatttttgtttcattgagaatttaagcagtaggtacaggagaagtgacttgtcacattaatttggtgcctaaatctgtaactacaagttgtgatcgacatgtacaaaatgtctaagaaaggtcatatgctgaatattttacttttcctgtatagtctgcatgatttgtttcataaacccagcttatttcctccaaaaagcaaaatggtcctgtaatttttaaagtaaaataaacgtgccattttgtctgcaatctataatttcaggaagttattgaaagttctgactcagggctttttaacagttcaagcaattgtcagttatattttggaaactccatctgtgtaattctccagtgccttgaaagaattattaacttggcaacactattaaaactttataaaagatggtctttagtgcacgtgtatcattatatacacgttttaaagtcatattgcttagcttgttaataatgattctgcatgtgtgctgggtttgggtaattctttaaaggaagttttctagatttgcacttgatgtttgttttttaaaaactgattatttatggccgtgacactgttaccagaaaagtaattctaattaagttattatgcaaagtcatctataagtagcatctgggaagaggagatcgaggccacagtttgctattttagtatgaaaggaggatctgtttgggaaacatagattgtcttcccctcaaatgaggggaaaaaaaaaagaccctttgttcaaatggattctgttgtaaaaaattatttttaaaggaaatcacaaattgtatgtcattcttaatgctagtcttatagaataaatccataaaattgtttttatgttcagtatgtttatgtcattctaaatgcagcaaattcaatgatagcagttcaattgactcatagcagtgttttgtattttttctaattctttagctttcaatattggattaaagtcttgtttgtgaatatagtttccgtatggcaaatgatttcttgcttattagcttttgttaaagaatgcttagtaagagctaagcttttaaaagtaatgcaaacatttatcgttaataaaacctatggtgtaatatcatataatgcttttctttgatctttggagaattattcttttatagtagtatacatgaattttgatttttaaagcatttaaaaacaaatctcaatacattaaaaaacctgttattgttaaaaaggaaattaccatgcctttaagaaacaaggatgtacatcttcaattcagcataagtgtccacatctagaaggctctcattgcagttgtttacagttaaggtacctctatctaaagggccaaagaagcatttcatattttaacacctcacattctttcaggattaagacatatgaaaatagtctgaataggataaatttgataggaagtaacttaaccagtctggaagattcagctttttctataaaaagcttattcctcttcacaactcagatgtagatttcattttcaagaggtagatattttaaagcaatgatctatttgggttttagttttatgagtaaatcattaattgtatggtttgggggttattttattttccatgttaatataagcacttatttctgaagttattgagaggtcatctagctccagttcaaaagattatgtatatctgatgtttaagaggaaaaacatctgaaaaaatatcttttgtttatttgaaaaaagcatatatattccaactttaaaattgtgaatttattttgagtaacctctaattaactgtatttttttgtttctgttgctgtatagttagaaatttcatggcaatattttttactaaattgaaactataggttttaaaaataaagacattttagaaaa

SEQ ID NO: 28 - DNA, 93533 bp, Homo sapiens
  DNA (1)..(93533): CD44
gagaagaaagccagtgcgtctctgggcgcaggggccagtggggctcggaggcacaggcaccccgcgacactccaggttccccgacccacgtccctggcagccccgattatttacagcctcagcagagcacggggcgggggcagaggggcccgcccgggagggctgctacttcttaaaacctctgcgggctgcttagtcacagccccccttgcttgggtgtgtccttcgctcgctccctccctccgtcttaggtcactgttttcaacctcgaataaaaactgcagccaacttccgaggcagcctcattgcccagcggaccccagcctctgccaggttcggtccgccatcctcgtcccgtcctccgccggcccctgccccgcgcccagggatcctccagctcctttcgcccgcgccctccgttcgctccggacaccatggacaagttttggtggcacgcagcctggggactctgcctcgtgccgctgagcctggcgcagatcggtgagtgcccgccgcagcctgggcagcaagatgggtgcggggtgctcagcgcggacccggcggcagcccctccggctgagtcggccctgggggactggagtcaagtgagctgtctgcgaagtgcattgggctccggaaagcagggctgggatttgcgctaaaccgttggagaatgtgtctgtggaagcaccatttggttgaaagaaaaagagaaagagaagaaagtttgttgggcaggctgccggcgcgcagttttgggcgaggtcgctagagctgcagcacatggcagaaagtaaccgttctcccggatgcgcacagtcgttgtctggactaacaggctcctgtgcccaagggctcgccaagccccaccgggctgtgtctaggcagggcagagctgggcggggcagagactggggctggaacagggcgagtggctgttatcaaggtggtcacagaagggatcacaattccaagtgtgagactagctggcaatgggttttccagaaaggggtcctgggttctcccagctccccactgagccttgttccaaagcttacagtccgcagtgtcactgccaccttagcgctgtggaagcttgaaccagctctgcggtgaggtcttgggtctccatgagattccagcctgggatagggagcatgaatatgagaggcaaccactggaccagctgcttggtcctcaccacctcctgcttctgccaatcagtgtggggaaatctcaacagtaaggtggcttatattccctgcctggcagcctcagagcagagagaagagccttgataccagggcaacatcagggaccctggagctagggctccaatatctcatccaaacagggtcagtgctttgtggtggctatggaggggaggggctgcgtgtaaggtatattctagcacggctcaactccaagcattctctttctttgtctatgtatgtacagataattacatggccgatttgcttatcgctggccaaaattaatctttcttttaagaagtgccagctgggtcattaagacagctcagcctgcatgcagtaaattctactcagcaaatatttattaacccagttccacgggagtactgagaaattgaaacacacagtctcacccaggtagtttagattgagtacccagtataaagtatcttgaattactttctgctttctctatcttcctactttctgcagtaggaagaaagtgaccctaggtggaggctaggcaggatgagttctctgtgcatatgcatctccctttctgtgtgagtgagaggtctttgctaggtggggatttggggatctaggatttatactactgaagctgaaataataataataatgatagcaacaacacagcctgtcatggtggcccatgcctgtaatcctaggactttgggaggctgaggcagcaaattacccaaggtcaggagtttgagaccagccttggccaacatggtgaaaccccatctttacaaaaaatacaaaaattagcagggtgtggtggtgcacacctgtagtcccagctgcttgggacgctgaggcaggagaattgcttgaacctaggaggtgaaggttgcagtgaaccaagattatgccattgcactccagcctgggtgacaaagcgtgactctgttaaaaaaaaaaaaatgaatacagtgctagctaccatttactgtatattttcactgtgccaggcattatgttaaatattttccatgtgttatctcattctaccctcacaatggcctagtaagaagcttcctgttatcaggcctgtttgacaggaggaaaactgatgcttagagacgttaagtgacttgctggcattcacatagccaggagcagtgctggatggaaacccagctccactgagctccaaagcctaggcttagaatatgttagactgtataagatggacgaacttggaaggatttcagggagggaaggattttggtggactctaggccttagggaaagttccaaaagggactggagctcaaataagcccttgaaaagtggaaacattcaggatgggagagaagagtcaagctggagatcagggagagccctgggcctggcctgaaagaagagggccctggtggtttccctatagtctctagggaagtttatttgtatgttacctaccagtgccatcttctgctttgtctttgggcattctgactcctgactccttccaacctgtctccccgttccttctaaaaggccccacttccaaatatttggcactgtcctaacccttgaggttctcccagagacccgcagtctccctcctgccccgtgtttccacggcccctttgcgcagcatcatttagaggaagtacaatgaagtgccagtagcaataactgccccggccctcgctttcatgtgcttgtaaagttgtttggcaggaactgggacttggaaaggagacatgactttgtcagagggcttggggctgggcatggtgtgggtggcgaaggggagaaggaggaaaggggaaggaaaggagctcttgttgccccattctggggagtggtggactctggacaaccacgaggaaactttggaaaggagcaaggctttgaggaggagtccagtctttgtatgggaaagcaaaaagtggagaaatggccaaatgtagttaagtgacattggacccagaaactctgagttggggaacagatatcttgaattcggggtcttgtgcaggaggaagaaagtggcccttggtggaggccaggggggatgagtccttcatgcacatgcatctccttgtctctgtgggtgaggggatctttttttttaattattattatactttaagttttagggttcaaccattgtggaagtcagtgtggcgattcctcagggatctagaactagaaataccatttgacccagccatcccattactgggtatatacccaaaggactacaaatcatgctgctataaagacacatgcacatgtatgtttattgtggcattattcacaatagcaaagacttggaaccaacccaaatgtccaacaatgatagactgggtgaggggatctttgcttgggaattgcatgcctggtgttgagaaagaggagagcgtctgagagccctgggtcttagggctggcacacacctttctgctcccttctctctaattgagcattagagactccgccccctgctgggagttagaactttagctgtgttttcccatgtgaaggagcaaagaggcaaagcttcatctctgttggggctagcatcaactaattcaggtattccccatttacacattggacatctacttgctgcaaaggcatggtgacaagtccttgtgtgggaggctggcagccagtaggaaaatgttccatttgttttttcccaaatttccccacaaaggaggggatgctggacagcatgaaattcttagttcatgacagattcccttccattcattcaggaactatttcctgactcattgtcatagactcagagatgggaactctaaggatcatttagaaaatctgaaagagagggactagtgacttcccctctctgcgacttgttaagatattagggcagggcatttctctcatgtatctctatcatgaggactgtgggagcctcaaccccaccccctgcagtgggtggggagggtgtggtctactggggtaacaacatttgtttcacaccttaaatactaccttacagactcattacagttttatatattactctacaatatacccaatttgagtttaatacaataataatgatatatatttttgaccatatagcaatgttggtgttcgacaatgattctctgtattgtcctggggcttctagcacctcctggaacatcgctagatggtcaggagcaccaaagttttaaaaacctgatgctctgctgtggtaccatatggtcctgtgtaaagcagggtcctaagtcctgagtctctaggaaatactgctcagtgagcactgactctatactagatgtgaagccgggggtagcacaggatatcttatctaagcctcccaacagcccaatacacctagcactctctttaactccattttctagataaagagatcgagacttgtggagatggcatgacttgccccaggatccagtggtggagttgggatttccgcattatctaacatcctcccatgttagactccaatgcttatgctccttcaattcattacgtgtctggaggactttggaagctatacgtggctctcccacactacctgtcccctgtggccagcataagtgaactcttgcatgggtggcttctctctccatccccggcaggctgtggactcttggctgccctgccctggcctgtctctccccaggtttggccacagatatcagagatgccaaccaagttatttgtaactaaaataaatcacatcccttatcagagtccagctgccctcccagatatgctctgatttacaggcttggaataaagagagaggtggttgcttgtctacaggacaagttagggcaatgccctctgcctgaatattaggaaagcagcattacaggagctctcactctgaccaggcaagcatttcacatgcacagacccagagacccactcctcacatgctcattagtaggttgtgcgaccctgggtaggaggctgacatgggtcttgaactgaaacccagtgtgtggctctaggtgacatgtggccacccaagtgaggtttcggatccacctgcagtgtcagatgcttcaaggctggggtcccctgatggagaggaggtggttggagatcacctgggcctcctcagcactgcctcctggctggggctggggctggggataagagagtaactgcaattgtgcttccccggcaccttcgctttaggtcactccaccgaagagcctgaaagggaagtggttcttgcgaaagaatgagctgaagcaggtggcagatgctaccaggcaccgtgtagttttcaaaggggatctttttctgcctcagagagaaattctggggtttgcacagcaagaaaccgatgactcaatttcctttgtgtccctgctttaatgggaaggttgtaggcgttctttagaatggcagggtaggttgataccttctaccttaaatttgaatcccacttttcactcacttagcaggttgaattttttttaagtgtaccccccacagctgcccaactgggtttgcgaggcaagcccaacttgccagagtaaaccggaaggggtgctttctaaagtttgtggttctggagtctggccaggcatggatacagtcattgtgcgttccagattttctgggagagtcaggatctcaaatatgcaaacactctaccaattgatgtctagtgcatattttgactaaatgtttatatatttttccacaaataaatacatgacttaatgtaattgaaagtcaaacactttttaaaaatgctttttgcataaagaaattcacatctttacaactccttaactaggatggtgtcaattaaattaatgtttgattcaggacatgtgtactttggaggtaagtatttcatattcctcccctctccattgctcaattgccccactgggtgacgtaccaagataagccacatgtttgattcttgtttgctggatgtggacatatgcacattgcaggtatgcctataagtacatgcctgaaggatctatgtgtgtggtgggaattggtgatgccaaagaatgctaaagactttcatgccccttaaaggggaaaataaccacaacaaaacaaattccaatgtatcttctcctgtcttctgcagcactgggggagtcccctgataacagggatcatgtcacattcatttttgtgggcccagatcccagtaatattgacccataactgttgaactgcaatgaatgtctagaatataaaagtcatgatatctatatatatggaagcatgctgtcagtatgggctaaggtgcaaatacatttatgtgtaagtgagaaccatggtgatggctgtgttgctcaggacagggctgacttggctggctgactgcccaccacaggcctcatgtttggtctaccccaaacagtgagctcacccatctgtttgtttgcggctttggtggctgcctgctgtgaccgctggggacatctggctaaagacagggttactagatagttgggctgagaagggagtgggagccagtgagatgaggacaccaaccccaaatttaagcctcaaaacaaaaacactccccagcagcagccaccttggggttctagttattttggagatactgatacgaggttgagatccttgggtgagaggcccacactcctccaacccccatgtctgcttctggaaggtggtggcagaggagagaagtagaagtactatatgggagatgcgggagattcttgccttctctgtcggtctctttgggcaattatcaagctgtcatctgaccagatactaccatagcttcttcgggggcaaatccgtagggaatcctgacatccgacggggagccactttggcaatggcaaacggtgtctcctctccacagagcttgtgatgtcagaaattacccataactggggcaggttttgtcttcccaaagattgtctgcccagctagacctgagagacagggagacaaacacagaatgagggggtgggtcttgtgggggtggggaacgatggaaactcacagagccagatctccccgagtttgagttgcactggctgcctgggtgtgtcctcctgaggtaagtgtccctgcgaagtgcaagtgtgggcagacagatctcaggtgggtggggagggactgagtcaccaaggaggtgatttgcaaaactcaggtcccagaaactttcaggtcttcagcttttaaaagtaaaggttaattgcaaaactccggggttgagggaagagattattcacatagaccagtcattttgagcatctgctgttgtggcattgcaagtctccttcgcagtgcctgaaagttcatttgtttttgagagctcttacgctttttctgtttgcatctttgcacaagttctatgtttctgagaaccctcaccactattagtaataatagcaaacacttacagagtgttgaccatgtaccagcgccattctaattgtttcctatatactgccttgtttaatccaaacactgacttcatgaaggtggtgctgttattatctgtcttttacatatgaggaaactgaggcacagagaatttaagtagcttgcccaaggccatgcagctgataagtgatggcgctgggattcaaactcacatctggctacagagttcatgctctttgtcactatgttagagtgcttctcttggtatattaagatatcgaggcaccctagaaatccagacgattgtacctggaagtactgtagttgttttcaaaaacttcatttgggaatctagttgtgggtgaggtcataacatccactgagcttttaaacatgatgtcagaggaaggggttagaattgcaaaaatgaaggaggaggaagttgtaatggaaacttctgccaatgcatattctgagttgactcattcattctgatctctgaatagaagctctactctcttccatgtgatggaaagttgaggatagggtagggctgagagggatgtgaattgagttgtttgttcattaggataggatagggctgaaagggatgtgaattgagttgtttgttcattatcacttcattatttgtcacctggatgaaaggtaaaggtggctgattagtgtttctccatcagctagaactttgactgggaaatgagccaatcaaatagcagcaaaatatttgccctcaccttacaggcccttggttccagggtcttctctccaccggctagaatggatgagggagggagagaaactctgagaaaagaggctgtcaggagtagggctgtacatatccagggcacaaggaatttggcaaaagctggaagtatactatagcccttctctccagccctagcctaaaccagatgaccaggcttctatttggcccagcatgtgaccatcccatcagggagcaagagagtttcctctgggtacccctcactgagaaaaaagccacccaggaagggaggaggcaaggccccctgggaacatctggctcagtccacaggaagggatgcaggccttttcctgggaatgaggactcatcccatattccagcccccttcccccaacttttttttttttcaattttagtgcatctctttacacttaacaggtctgcagtgacttctaggaggatccacacaccaatcgtggaactaggcagcatctttttccacttcctttccaagatagtagcacgataacagtaaagcccctttgcaagtgttcactattatgcacattaagatgccagggagagggctgggaaaggtggctcacacctgtaatcccagcactttgggaggccgaggcaggcggatgacctgaggtcgggagttcgagaccagcctgaccaacatggagaaaccccgtctctactaaaaatacaaaaaaattagccgggcatggtggtgcatgcctgtaatctcagctacttgggaggctgaggcaggagaatcacttgaacccgggaggcagaggttgcagtgagccaagatcacgccattgcactccagcctgggcaacaagagcgaaactcggtctcaaaaaaaaaaaaggtgccagggagaaatgaacaattccatgcagccaacacctggtctcctgcgtttggcttagaagggcatttctgcccaagcccccagctctagtctttgcacactttaaatgagtagctactacatgccaatcacagatgttgcctctgctgagtatccagtcaaaaaaccagaatctaacagagctaactaagcaccatcttgcaggaaaccagctgacgtcagctccgcagccaccagtgagttactgggcccacatctgcctgcaagagggggaggggaattcaggtaacccacaagaggggataaaagttcggggaagaaatctcctgtcaaggagtttgtttttgcagtggatcctctgcagtgagactagttgtctttacaatatcattagaggtcaggtacattcctgtagactcccttaagtgacttgctttctcctattgttccccctgaaaattcataaaaacctcacaaacacatctccatttaaaaagagaaagtttaaaggatgccatgtaatggttatctcttttcttttgccagtgagcataaaagctccttagggaaaagcccaaaccctctatacattttcatattcatgatagccctgagcggtcagcacagttccccaattatagtgggtgctcaataaacacttggatggcttactgaattaataatgtttctagacttggctagcaaagccatctccgttacttatcttttgtgatttttataggttctgtctaattctttttcttcattttttttctttctggtctatacaaatcttctttcatttttctctattgctacttgtagcgatcctcaacccgcctcctcccttgaaatttctgttctctgcactctcttcagtctaaagagatctttcttgaggtttgaaatgttacacaaggcaggggaagtttagagctaattgtattttgtccagtagaacggggatctggatttcctataggtctggctgcctctttgtctacacctttacttccaaatctggcctcatgtataaaaagaccccaaaccttaaaatcatgttctcaacaatactcagagaaaaattgttggctttttggtcaccatgctagaggaataaaagggcagttgtttctttcggtcaatggtttgaaaacctcccagactaaaaatcacctccatataatcagatgcttggtgtggtgtaatgaagatgaggaggtctggctttgataagagtcatttagaaggtataaaggcagtggaacaagacgggaggacccatacaccagttgattcccctcttgccacttaacagcagcgtgagcttgggcagttgcacttgttaaatgtctggaacaatacttagcacgtaatttctaaagcttaatgtttagttcacagaaggtatcccaagaatagaaatgattattatattttagcttctctctattactgattcactatgtgctgctaggcaaagtatttcacccccatttacttctatttttccatgtgtaaaatgcgagggttggattctagttgatctgtcaagtcctttccaggcctcatgttctataaattcaccactctgtgggcttactaacacctgagcctcataaaacctaatggaaagaataacacaaaaccaccataaggcagtgtcaaaaaaaattgatgcctgatttgtattaaatgtcaaaagtgaattattaatccatgccagaaataaacatatggacccaattacactctaactccaatgggcaagagtgttgtagggacaaagtgctttgcccgtagtacttcatagaatcctctagaccatgtggaaggtgagcagatgaagcagctctggccagagaagttaggaacatgtcccagtcacacaactgaaactgcaggaagtcagtcctgggattaactgcaggatctgaacactgtactctttatattgtactttaaaaacattgcttcacatggccagaaaagccaacctctgaagaagagaaaaattgttcccttcactctcagagcttcatgagcaccttggacttgccagctttcctcaagcaacccctgtaacttgttggcacaaaattaaccacaatattcagacaaagcagtacttacagggtgagtgctagtatcctatgcaactagggtagcctgagaatctaggggaaaaaaagctagaccaaacaaaagattatatataatctttccccaaatcaaggcactgagcaaggcaggcctgagagatggtgaatttctgcttctactgagagtcctccagacccccagtaaaaatttcttttcatcataaaaccagagaaactcttgctcaggaaaaagaaagaaaaatggaaatcataaagattgcacgacttaggattttgtcaaaatgtgtcagaggctataatataaggctagtttttggcattctgtcagtcactgaatgtccttcgtcagatcacagctccttttggttgtgctgactttatacccatctggaatccactgaccattagctgaaataaaatcccagatgtgctcagatctcacatcctgtgcaatgccctcagttattgctgatacggttcagtcatctgtctctccagctaatcatacagacacagtattctaggagaagtgagaacccactcatagccaggagagcttctccctctcagtcacagggtgactgtgggcaaggtccttcccctgttggttgcctctgtctccccagttataagatggtgacaaactgaccaacttaaaatttccttaaaatgtattggcactgtggacagaaatgaggaaagtggaagacctagtttctgtcctcagggagcttaccatttggtggaaataaagttaaacaggtgaaagaattatgcaagagagcataaccaagtgtcagaagacaggaaaaacagacatctcgattgcatgtgaaggcttcaaggaatttgaggatgagttgaatgtggaaaagaagatagacagagagaggggagaggagagaaacccagggaaaggcaaaacatgagccaggtgtttaaagtgggggaataagaatggcttgattggggccaggggaggggtctgtctgcttggataagagaattcatgaaaagaacagtgagagatgaggtcggacagattccaggcaatcaagtaacagtggcactgtccactggcagaagatccaatttttctgccccagaaactcagaagttctcatgaatcaccctctcagacagtgctagacagagttcagaagcaggccagctccaacagtgagaaagaactttggcaactttgcctgggttagagagtggcaatttaagtgaatcccaaacaagacctactgtggcaatagcaaatagattttagctcaaggaacatttcccattgactcctagaggcttcccaaaatgctgtactaagaagtcaaaccttggctcaggtatggagagtgctgtgatccattagtgatgtctgctatgggcacaatatgaaggatttgacccccatgcatcacatggacatcaccgtagtggagcagcaggctttctttgttaatgtttctgagagttgtgtgtatagtcctctgggagtttagccattctagaatctgtccagctagccatactatagactctatctccttctagaacagtaaaaaagcagtctcttgcccagagggcagaggttagtcacttgagccttttgttaggattcactcccattctgtcttcccatttacccacatgaagttagatgctgggagccagatatttcctgtgtttgaacaagggccagacttcctggcaaagggtcccttcttcccatcagtttcttcaactgcaaactgagaagacaaaagtgatgcctcacccgtggtggcgacaggaggaataactagctaatgcgaggaaagcttttgaagatgaaagggtggtatgtgcatgttaattacaacttttatcagccctggagcctctgcattctcagctgccactggaagctcttctgtgcctcccaaatgcaaacagcagccacattccatgagctggcctcactaagtcctgcttagagcatccaagtcaagaaggttggattttgagctcaggctggccagctggctcactctgggccactcaagtttcccactactcatccccaagggaaaaagtaggctagctacctgggcaggtaagataagatagaaccaaggtataaacaaaaggctccatcaaaagtctaccagaaatagcccctgggtaagattaggacactctgctctaattcccaccctgtgaaagcctaattgtttgaccttgggctattggctttatctgtctaatggttcaatatactgtgtgaaccatttggggataataatccctctgcctcccctagacctctccacctttgcctgctggtgtgaaagtgttttgtgctagtaggcagaaacacgtgatataaaactacaaggtcctattattacctaggataactttcgcctctatctatgtctcctgttgctggttgaccccaatcattgaaactgtattctttggaatgctcagcagtctcctccaagctgccattccctccttatctaggtgggcccagtattggctcaggcttcttggttgtgccacttcctaaggcttgcaaatgcattcagcctgcccttgctctcagtgccagctctcagtgcccttgctgggataactcaataaagggctagaggtgggaatgggataatcatcagatgctttgctagtgctgacgggacagcttagaaggtataaactgagctgggcccatgcagcaacaccaaaatatgtgttcaaagagggagaagaggagaaaaagagaaaggaagttatcgtggtctgataacagggcatgtcagaatgggaaagggtgttaggaattatgtagccaacttgtttgattggaaagataaggaagcctcaagggctgcaagtgactttcccaaggtcacaaaactaattggtggcaaaaccgtggtcttctgacttgtccggtttcctttcattttatcctttgagacgataaaggagaggacactaactaaacaagaagacaatgatctgatcaggacaagaagacttggagtacaaaatgagaagaagataatagggtaatggattttttagtggcacagtgggaaatggcgtaggtgtttacactgcactggagccctcactgtgcttggaactggttccctgtgcacagtcttgcacacccatatttggtatttttttatcctttttgacttaatgagcatttggaaaccataaggcccacagcaacctgacctttgacttgcccagactctctgagcaattttgtgagttgagtcaacaatcaatggttttcaaattattcaattgttcactcaacgcatactagttgaacaccaatatctgtgctctgctaggcactggggataccactgtagacaagagaggcatagtctcctctctcctggaacttacagtctatctggaagacagacagtaaacaactaatgatgcctttgtttaattacacttgtggtaagtgctatgaaggagaagcactggatcttgtgagagcataatagggagatctcatctgatttaaagcaccagggaaagcctcccaggacctgttggatgaatagcagtaaccatgtctccaggatccccacaattccttgaggacccttgttgtcagacttctcagagctgtaccagccctctcactgtctcaccattgggtcttctgagtaagaaagcaagaaaaaaaattttactcctcaaaattctgaaagcaagtggtttatcatgtctgccctgtaatagtggtgggaagaaaatcatgagaacctctaagctgactcaggattttagaagcacacatttggggagaagggaaacaaaaattctggagaagcaaaaagtgtcatatggtatagaagttattttaagctactggggaaaattcataatttacttagggatcttgagtgtcaagcattggtttagagacaaatcttatccatttcgttgaaagttccttgatcttgtggctgaagcttgggcctagggttttattagtgtacatttaggggatggtttacagggtgtctttcaaggtcatacaggtgcctcttttggggtcaggcaggaggaataggacaaactctgggatacgaatgtacaaccatttggctcctagggcctcagtcctttagctccttgcttctggtgacttcttggagacaagagtagactttttcagaacagcgagatagttgtgctgacaaaacaaaaacaaaaacatcatttaagatgccttcagatgcaagtacatgtcataatagaaatatttaaaaattagtagagtataggcactagctaattcaaatgcttggttgtaaacaactatgtcttgtaaatgagaataaagtttattctctcaatgacgatgataacatctttctcactcacttttactcaaattggctttattgggcaggagagacagagatggagttataggtatcatgattgaacttaagctacaacccatctatgcatcaaaccatcatgtgtctcgtgtgattgttatctgttgtgtatattttggtatatccctatctgtacataccagctgaatatttctgtaagtaacagaacaatcagctctcataaaatattacctcccagggcaagaagtctgggatgattccaggaagtcaatgatattatcaagactcaggtttatttttccaactttcaattctgccactcccagtgtcttcctgcaatttagcacccctcatgttcctaaactaaatcccacagttccaggcatcctaggaaaaaaaaaatcaatatttagcagcagaagaaagagtgtatattcacaaacatctcttctaaaattggaggagcggctttttgggaagtccttaattgacctctccttatttctcattggatgaatggggtcacatgcccacacctaaccaatcactggcaagaagagcttggaccacagtgcttgacttagaccaatcatgatccacccactggagctgggatttgaggtctcacctgtcctgaagcacaaattcagggtttctgaataaaattgcacttcaggtagaatagaataactttttttgcattggtaacaatgtgggctacaatgagtaagggagtccatttacctgctagagttgtggtttgagactatttgggctaaggaaagaaggcaaagctaagtttttgtgcctctgtgccacaccctcaacctttttctgaaaagacatgcctcatgggtagagctcacatgggggacacactgcagtttgaggtttagatggtctgtggcttatactcaatgataatacctaaaactttatcctttcctgtcttctacaaaagagaattatatcagggaataatcttaaatctgttataatttacaagaaatagccagtcttctgcacacttgagtactttattattagaaactcattacttgcaacccatctcagcactgttggagctacaccatgcatgaggaccgctgctctagagtcatccattaaaaaagaattcctacgaacctgaatgagcatttctttctctaaattatgagatgatgaccctcaagggaaatggccgtcttcccttttctactgcactcttagagtgcattaatgtgtgtgaagtgttttcggttccattatctaaagcagccctcatattaacatcgtggttggcattactggcctcctgtatgggatgaaagtttaatgacttctgcaaggttatgaaaggtcaagatcacagctaattagtgcaaattcaggatttgaattctagtttctaccccagagctgatgtccatgtcaccatggacatcatttgctcccaatatacctgatttactttcaaggggtctggaattgactattggattttatattaaaaattgctctttcataggcaggaaaaagtccttcctaatagtttgagtccaaagcttaagggtctagcatctcaactttttaatgaacccaaaaatgaacaggagggttttctgagccagtcccctgcctccacacagttagctcatgaatccaacatcatgggaggaagtcttcaggattttgtttcccattccttttttatcacctaaatatagttaaaggatttgtgatgactgcatccagagatgtttaaaaatggacctgaaggatgtgattgtgtcttaggcaggaagggtgccggttcttttcagtatctaatgatgaacgatctaaaggaaatggattctaaaccatttgattctaaaccaaaatggtgtatgtttcttttgagggtgaatttcctgatcatgagccttgttgagcattagactggccggctggttcctaatccatccttcagttctcagctgcagtgacatttccttagagagacagatctcctttggggacagcacaggacttgagaaaaaaggcttccctttccactgagcttggctccaactacacctcatgtgtctgttacatttatcatgctgtgttgtcaacttgtttaatgtctgtcagtggctcatgcctgtaattcagcactttgggagcctgaggcaaaagacttactttgacagcagaggtttgcagaggttgctgggcaacatagtgagaccctgtctctacaaaaatatatttttaattggctgtgcatggtggcatgcacctgtagtcccagctgctcaggaggctgaggtgggaggagtgcttgggcccaggagtttgaggttacactgagctaagattgtgctactgcactccagcctgggtgatggagccagaccctgtctctattaaaaattaggaaaagaaatagcctgtctactctattggtccataacctctatcgagacagtgaccttgtctgctttattcaatgcctggatcttttcctagcacagtgcccagcacatggagacactgaatttggattctcctttttgaagtccccatatccacttcagtattggggtgattttgatgggattgtgacttaccatggtggatgcatcctgtgagttccaaactcaacttcttaaaaaaccttgtctatcatctatccatctatctgtctgtctgtctatctatctatctatctatctatctatctatctatctatctatcatctgtctgtattctatgttccatctatcatctatctgtcatatatctatctctatctattaattatctctatctttatctatttatatctatcatctatctgccatatatctatctctatctcttaattgtctctatctttatctatttatatctatcatctatctatatctatcatcttttaacctatctgtttctattggaataagagacaagtgcttgaaaagcagaggagagtcaatacacaggccacatcttctctcactccctccttcctcctcatagctgtgagccaccccagtccctgtacctgcttccttggctggcatcatctaagaaatcatctcttccacagtttcctgcaagggcatcaccccaagggaagctgaacacatgcaacatctgcccactcaggataagtgtgagggataaggaggaaacatttttcctctagagacaggactgttggggcaagggctggggaagcaagacatggatactccaggctacttcttgctggggctgaggggagtgctcggtgtggctcccctctgggacgtgtttagggcagctctctcgcctctgaaacaagcctcatcagatcatccccaggcttccttccgcatagtttctgatgatataggaaaggagcccgattatctgtttgagcttcctgttctttgtattgtttggaaggctaaagtcaacagccacttttgtattctgcattgtttgcgttgttaaaaactctggaaaactcatctggtttcttctccaaaagtagcttcccagagccctgggagacactcagaaataagatccttttcaaataggccagcagggaccagggtctctcagaaccagctttcctatcttcttccaaaggccggaattgagaaggtttactccagcccacataattgagtctctgggctgtcaaggacgcattggggagtttgcttctggtgtgctgggtgcttagaaagccgtatgaattgcagagatagagttgggttccagttctgccagtcaccaattatgtggccttaagcagtttacttaacttttctgagcctcaattttctcttctctaaaatagagttgtaatatacctatggcttagagttgtgtaaggactgacgcgatcacagacttgaaacccttgatagaacgactggcatggagtaagcattcaacagtcataattaaggtcattgtgatgattacacttggggcctctccattcaccatttgccccaactgtgttcctgctgcacttgaaaatgattccagctgcctctggaagattttcatcccatttctgggaaaaacattagccaataaactctcattgaatttggcagggcgggcacaccagcaagctgacactatgtgcatacaggcttcctggaacaactgttgctgagcaaatgaagcagcatggaatgttccgggaagcaggattattgctgtagctggtgaaagtgaactgggaaacgcactccaggtcctgtctttacttgcacaattacagtcaatccccaaggctgcttgtctcagcaggatcagcctcttcctgccttctgtcctggcagtgggtggtggggctggaggaagaaatggtgttttcctccctctcccattgcaattgtttccttacagtgctgttctctgaggccagagaacagaagggctctttccagaggcagtttaacagagtagcttccttttcattctgagaagtttggagtttcccagagtccacttcctccctagaagcgcaagcttggaatttcttggttgccaatgaggtgccagcttctgagtgcataaagtgtgtccatcgtttttaatcaattctctcatctccaaaaatacctttaattgcctttagctgcttagttctgctgtcctctaaagaaaacaagatctggccactcccagccacacctcagaagtgagtaaggcttttgcaccttttaataggagtatttacatgtgtgtcggtttctcatctgcttttaatttcattagagtgtgattttggactgttgtttgagatgaaagagcagattatcaaagtgcagatgattttttcatggtgcaaacacatcataaattagaaactatgagacccctttgcagcggggaagactggggccagtcatccaaggtttcatcttcctgtaggagaagggaaaaaaaacggacatttattaactatctgttatgatccagactctctactggtgctttttgtatatttattctctaactcccatcaacttctctttgagagaggcagcaaatgacaactgaataaatgaatggctgaatttcatcagagccagtttacaggcagagaaactgaggctcataaagcggacgtaacctgcctgagatgtctcagcttttatatggtggggctggaattcaattcagagctccttctcccttttaacactacactgcaagttcccattcagcttcatgggattaatcctgttcttctgtccctagaatggagccttgaaagttcaaggtgtctccttttcctaagaaactggatttttctggctccttgagaattgaggagctcaaaacaattgagaactcttgggaggcatcttcaggaaaggaggtggtggaaactttcctctcctcactctccccaggggcaatggggcctccaaggccatcaaagatcaaggtgccaggtgggggatgcctcccagcttcccattcatttttcagttgggggccactcagcagctcctcaggtgaggattgtctcagaactgaagaatggttcaaattggcccaagatgctgaaatttattgcagggatcactgggacagtgtgtagcaatttaggaggcttctctctaagggaatcagtagctgctgcatttctcttaattgaaaccactctttccctccagcttcgatggggcaggttctcatatctgcgtgctgaaaggcgtttatttggtgtattctgagagcaggatgctggtaacactttcttttgtgttttgccaattgtttctttttactggctagtccaccctgtctgacgcattcattataccataaccaccttgacaccagagtgaaatgccatttctctgcaggtaggagagagtcacacggattccttgagtgtttgtagcgtaagtgagaaagatatgtagccttcttctagaggcagagggatgggttggctgggacttagagatattcaaatccaactctgttcttgtctgataaagtaaacgaggcctctgaaggtaaagtgacttctgtaagtactcacagcttatcagtaagaagcctgatattaaaactccaggtcactagaccttcaacctaatgttcttcccactaaaccaagttaacatttattgtacaccatactaaatggcagacactggggacacaaagatgaataaggcatggtcccagtggaacccactttggttatatgggttaggacacttgaggcaggatcctccttagaatggtgttttataaagtctctctttctctttctctctctctcatctctctccaatctatcctctctatcaagagagaacacatgtaatgtagagtgagagcccatgtattggataattaggcttctggctcctaattatcaggaagcctggaggtcttgagtggttgtaaccaaggatactgaaagtggttgaccagttaataaagaattaagttagagtaagaggcactttacttttaagctgcctttaatacactttaatctttgagatgattggctaatatctgttaagtaccaggctctttgcagagagtcaggtcctttgctaaatgatttaggtatatttcttcatctaatactcaaaaagcaccccataaggaaggcattacttttattttactgatgaagagactgaggcttaaaggttaagaaaacatagcatgcataacatcccacaagagctcaagccaggacttggacccaagtctttcttggatctttccgatccaagccatatggttactgcaatctcacaatacaatgagggtaaatccttgcaatcaccagttaccagcaattgtgaagcaatggatggcatagatgtcagggggtcaggagagccttgcaagcgttcagagggcttgggagtggacacatcacagttgcactctgctgggcagcgctgtaagtctctgattggattttgccttgaattttttctggtcaagactcagaaaggatggatgtagcttcacttacaccaattctacccagcttgtgacccaaatggaactcttatcccttaagccaggtcattcagttgttgtagcctttgccttccaagtttcccttgtctaccctactgagtctgaattctaaggacatcttcttatggactgtgggaggcaaagatgaattccaaatcttatttaatctgtgtgctgggggggaagaggagtgtatttccttttgccaggtatctgagcctacaaaaagccccataaataagtaaaatgtgtccatgagttcataaaagagtgagccttagacatacagaccacctgtcaaaagagccctgtcattctctattatattatcctcttttattttctgtgtaacactatgagtatctgaaattaccgtattcatgtattaatcatttacctgtatactatatcctcactctagaggtaagctctttgagggcacagatcgtgtctgactccccagcccccaagattgtatctggcttgtatcaaccatatcatagggaaggtgctgtgaattgacaccttgcaccatgctttatggaaactaatggtgctttaagaggcacagatttcatagaaagagacccagttgttcccaccctgatggttctaggtctaggtctaggtcaccaatgtctatggtgaaagaatgggcttttgcgaggtatggtctcctgtcatgtatgagggtcatttatttaagggaaaaccaagaccttattttctttgacaactgcacacaagggtcatttgtaatgtccttcatttccaagcctctggatctttgcatggatcatgctccttaaaagaaggaagttatgtttggcctgcttcagctaagcatggaatggtaaagattttggtccaaaccctgtgacttgagttggatttaaaagcttgtcagaaatgagttctctggagcttggcatttgagactggcatccgttgttccagatgagatttcacggattgaaagctcaggaagaggtgtgaattacaagcaattagttcacagggcagttggaactgtagtaatcctggaaaccttttggcccacattttaaaaatatccccacaatccagcttctccctctgtagggcttctgcttgggaaagtttgtgtaactccccaaaacatctgaagagtgaatagcagtagtgttcttggactgcgaaggagaccctgcttcttatgtgcatgctcttgtgcacacagacagaaacacacacatacatgcacacacacacagacatgtacacccatgttcgctttagcatctgatagaaaaagaggaacatgaggaaagacagagattgagtcaccaacatgtgacctggtgatttctgagtcctctgactttgaaatcagtggaaatttagagctctactttgtcacttgtaatgctttgttgttgcaaataaatatttttgcagctgcatcacttcattgctaatatatttgaagaaggcaagataacctaaaggcatgaatcttgttctgttttaatccacctgtaagtcagtggtggttgtaaggtaaattgtaagtaagagctattggccaccaagtgccaagggttatgaatgatttacctttttttttttttctaaactgaaggaaactcatggttgttcctagaaaaacatgcacactcacttgcttgcattcggataagcttctttgagtaacagggaagaggccactaggattacaaggcagttagtgcccattggagtgtgactggcattgtgcaccctgtgaatcatagtggtggtatggggaaaggggtaaaaaagcatcaatctatggagtatgcgaaccagatggcatctgtcctgggaagaacaaatatccttcataggagaattagaggactatactagtcaggcagaaatccagtccattcatcaagcttttcctcttgctgtggtccctacagggtcagccctgtttaggctcaagcctcttaaatcccagtgcaagaccaatttctctatgaaattctccctgtcttctttggtctcatggctacttcctgggaggaaaaagtagtaatcagctccctccccccagctaaatgtgcatggtattagcaaattctaacccaagatgttaaaactatctgagaagaggcatgattctgcttcttgtctgtaccctcctaaagtcaaggtgcagcaaggagagagacatttgcatgtggcccctgagaaagaagagatttgtctgcctcaccccctgctggtgcaaacttgcacctctctcagcctcagttttcttatatgtatcaagtttcaatgatcgcaatagtacttatctcatgtgactactgtgggattgaaacgagatagttcatgtgaagtaccgagcacagagcctggcacacagtaggtactctattagtgttaatatcactggaaaacccagctgggggctcagcagtagaagctgccagagccttagtgttacagccacatccattaccccaccattcacatacatttcatgccccagggtgagaatccacatatcccaagcagagaggcacagctttggtaaactgagtcttagctaactcatgtcagaaaccaagtgttatcctggggtttgactcctggctcttgccacattcatagcaggatgctgagtggattgtactcagcctcacttgttgcatctgtgaaatgggggtgattttttgacttctcaaggtatagcatctattaaggcacatagactacaatctgacacaaattagcagctccatacattgcagaatcttttctttttcacttaaggagatgctaaaagaggcaagaggaaagaaaatcaaatttggagatgccgtgggctgtgtgttgaagttgggctctggtggaattggtggtgaccttttgcttctctccatctggatggctgtatcttcaaagacaacaagtcttaactgcagtttttgattgtataaatctggccaagtccactatttacccagcccagtctccttagagtaggattggaaactcaaactttgctatctcctctgcagagtgagcaagggacaatctttatgaaaaactttaagttgcaagatatttgtgttcttaataatgaagggaagaatacaaaaatgataatactaagcctggctcatggatagcatttttgcacaatatatttcatttgggctgcagcctttgagctgtactaattgctctgagcatctgtttgtatgtccgttgcatgggatgatttaccctcctaggtttccaaatgctttggagcccctggtttattgcaggacttactaagtggtggccatcgtcactttgattggcccctaccacagtattttccagacttttccaccaaggctcttagggctttgtggtgggtgccagaacaattgatggggtagggtgggtgctggaagagaatgagcatctggtagattgagtctctgggtctgcccttccaccctcactccagcccccattagctcagcttgattttcaaccacttgaaatactgtggttgtgcctaagacatcatgtcagggagagaaagaaacatctgaaaaccatcaatcttctctctgaatgcttccactggtcccatttgcctgttgacaacccaagttgaaaaggcagcaccagaggggaatggggaaaattagcagaactggaaaatctgagttgagatctgggtttaccaaactctccgtaagactttgagtctgtgaaacttatgtccattagtttcttcaccttttaaatgggtctgtagtacctaccctctgggcctcacaggctgcttttgggtgtgaaagtgctttataattggtgaaggaaactgctacgtggcaagaatagcaaagcctgatgtactttaatccattcggttctgctgagggtggagccccaatgtgtcttaattcatatgaggtttctgagaagctttttgagattttaatactgtcccaggtatgcacatcaaccttctcacttttatcccccaagctccaaaatttcataactttttatttcatcttgggtggcaggaaggcaaggtgtgcctgggggagctacagggagttattcaaggtcacataattagcttataattaacagagtttaggctagaaccagtgcatcccactcccagatgggggcccccggcttatctcagcatgtcagcaacccatgaatcagccctgaaatatagatattacctatgagtaacagtttctcatcctacctcaactgttacgaaagtcttccctcaaactaaagctaagcagttccacaaaatgccagctatagacattagcagaaactgtatattgattaggtgatgtatcagtcattgtaactacccagaaaaaaaaatacaatgacaaaaccaagtggcccaaccttattttctacttgcaagaggaaaaaccctatttgggccccaagatgcttttttcatttcatttaccacatcctgggtttgtgctagtcaatctgctaaatcaataagatccgaaaaagcagaaaacaaagatcgtgaggccagaggatttcctgatcaccatggcaacacacaggggtgggtactgtggtttctctgcctgaagacgcactcgtcaaagactacttggtgttacagaattctggtgcagtgaagcaacagttctgggacatatactttcttttgccagaaagactctgttggatccaggaccaggagtggggggttaaacagttctccataccctcacctccaagtccccatcatcccattaggagacagggacagtactgttctccaaactctcaaaacaacccaagagctttctaggctgtgcattgggttgatcatttggtggccttggctgaagggccagggtaacagctaggagaacccttgggattcttctccaatgtgacaggcccctccatgttggttcagcgttgactgccatgacaggctccaggctccacggaaaaaaggcagagaaatcagggggtccagccaggcgccaagacgttggggtgccttgcatttctaagtgccaagtgatgaatagctcagttgaaagcaacccagggcacattctggaggaaattctctgggtatgattgtgcatgactgttttctctgctcattaaaccctcatctgcctccagggcaattccgggagagactgagtcactcaagactcatggtctgcactgggcagccaaaggcgattcggccaccaagtgtgattctggcctcattcagaagtggatgctaaacaatacaccctttcaccaggagcccatcacatgggcatcaggagatgggggcgagtgatgtgccagccttctagactggcaggcctggggggcagcagagggcacaatagctagaaagactcccagatgaaaacttctgggctttgaagccttcgaacaaatgaagaagaaaatgacttcttcgtgtcctattaagacagtgagttgtggcttttttgagagcagcttgctcagacctcttatgaaagatagatcagtagcaacagcactggtgtaggagtcagaaatctgcaattatgaaccactgagttttgtgtgtgtgtgtgtgtgtttttgtttttgttttttgtttgttttgttttgttttttaacttgctggaggaccatactcggctatccttgattttattttctcctgtgtcacaagagaaattggttagaagcttcccattgtgcctcctggctttaaaaatagataatccaattaacaataatgctttaaaacaacaaaaccttgtccttttcccttcctacttctgatcagaaccagctcagtaagatttattagttgtgcaatctgttttggacatgagctcagcaaatcagaggacagaaatagaatcctggctttttaatgataaacactgtaaaaataaaaaatttggagagcttaccagtgcttctggctgcccaagtggtttgtgtgtggttgactcccaggagctcaatcactttgggtgcagtccacccagagagctatgttccagctacatcaacctggagccttagcttggtcagtctagatttttgggtttggctgcagacatctcgtaatgtcacaaggacagcctgtgtccttggtgacccaaccctgggccaaccccaagtcctggagtcctctcctaagagccctgcctaattgtagagagagcattcaggctgtaaagggcaggaggcctgggggctacgactaggtttgggctttctaaattcccaagagtatgatgggaagaccaacaggcagaatcagagagaagcagtcagcccactgctggggaaagccagtcaaggtcaagacttcagaatctcctctctggagagagagtgaaaattccattagtgaagtttgttccactgaagccttaccaggccttggtaaaggcccctatcttgtggtccagaatcaagggacttctgatcttaaaataatattcaataagctcaaattcttctctctagggctctcttttcatgatcacctctccacactttattaaaaaatcacatgaagggtaagtgggcttcctgtcatttcagtgtctgacctgtgcataagttggaatttaacactggaaaatgatcagccagattgcccagtctgaaacccaggtcccccagtgactagcacaagttacttacatcttctcaatgaatcagttacctcttgtgtaaaatggggataataaaaatgcctgccacacaggattgttaggaaaattaagtgaaatattaggtgtaaagtgctgaataccttgaacccagactaggcactcagtgagtgctcactgtggttatggaccaggagctgcaggaattagaacaccattgagtagcaggaactggctttattctcatcttcatgataaagcaacttctccttacatatagcttaatctggaaccaaaaatctaattctgcctcatccctcctgaggagatgacaaatagggatcaggcacacctgggtggctcaagttagaaaacaaattaactcattttgcagaatctggagacgtctggtctggagaactgacagtgccctctctttgggcatagtatgactgtaggttgtctttgggtggtcttcatatggaatgtactgtgtttgccatgttccctaggagatctggcctcagaaatggccctgtgatggtatgtgaacatactgtcctgtaactgagatgatagcttgcacattcagacagacaaagccagttacaaaactaaaagttggtctctgaaacatttgctttcggggaaaacagcaaatgttcacagaagcaaagttctgggttaaagacattttaagtatccaataaggaattctcagcaaacaccagctggtgattcctcagatatgatgtgggaaaggaacctgataggtgatctttttgcaccctataagactgcagcctgtcgggggttgggggcagaaagagagcatttattaattcattatttcattcaacatttgcctaccatgggaggctgtactaggtactgggaatataattgtgaagaagggagacaccatttctgttgtcaacgaagcccacagagaagttccaaaatttcagaatgctggaatttctggttactagagaccttgaagataataatttcttgtaattctttacctggttgtgtcacagactttgaaaaccaatgaaaaccagagatgttgccctacctaaacacacacacacacacacacacacacacatccatacacacaatcttgcatataatctcacaggtccatggatgtattgaccagctcctggattccatattgaaaatcccttgcagcccagctccaatactagtaccaggccactcacctctcaggaaagtttgggaagacgtagataatggcaacttgggtgaaaattacacagtgctctcttcccagcacatgttgtgattttctacaacttcagaaataactggggtggaccaagaagctattattcctcgcaggccctacaatctaggcaaagctttgaaatgtgctcggacaattttatcagagatctattttccttgatctgaggcttagggggcagtatagatgagattaatggcatttgggatcagtgatggtttatccaggagagaatgcatagtacctgtaaccaggagcctgaataggaggcaacatagcatagaggttagaatcctgactttcccacttggatgacattgggcaaaggacttcaccactttgtgcctcagtttcctcatctctaaaatgggtttagcaatagtgcctacctcatagcatttttatgagaattaaattagctgaagtacataaggcacctaataagtgtgcaatgctcattggctctgattattaagtgtcaaacaccatatcaagtgtttgacataccttatttcatgtaatagtcccataaaccctgacaggttcgcattgtcatcccatcaaggaagaggtggagagtcagagaggttaagtaattaacaacctgtgtcacctaaagtgagtggcagggtcaggaattgaaccaggtttgaggaggtcctaactaggttgaactactgaccttcataaaagtttggcactacagaccagctttataggacaaaaaaaccttctttcagagctcctttttctcgccttcctgacagctccctagcagacctcttcccatgtgggtagggagataaggttcctagacactgggacactggtctccatgacccctctgtgctgcccacagccctatagtaatgagcgtgctaaaggcctggtggcatttctaccacgggaagtctcctctccaaatccaaaagtggcctcaaacagtcagtgttttcagttgagctcatttatcgctcagagggaggcacttgggacattttattcattacatgatgcaggagatttattggagaccagagggctcaacggaaaacattcttggtttatttccagccagaaaggcttgtttgagagatgcaatcagccatttagtattagcttcttgaatcaaagtggatcctgaatcacagagttctctgtttctcaggagagacacacagacatctgaggagtcttgcctctctatagtggtttgcagcatggctagcaccattgccagagacactggcactctgtcaagcaatgttctgtggtccatggctattcacatcttaaccttgccttaattctacttcattgtgagtttgggcatgtttctttatttcttcccctctctgtgtgttagtttctccatctggaaaatgaggatactaatattacccacctcataggaatgttttaaggataaaatgagtaaataattctaaagtgcctaaaatagagcctggcatatacacaatgaatgcacaataaatattagccactgctcttgctgttggcattattaatatcctcccgggtaataatttgggtttgcgttagtatcaaggaaacctgatgaaatgtcttcataaattatcagggtttgaatgacacacagccttgaaaatgttggctccttttaagtcaagagggacctagagtagaaggattgtgaacattcacaggatagttgaccagaaatgaagtatttgacaccattcttgcaactcctaagtagctaaatagcgtcagggttaggagttggactttctcatgagatcaagataaatgtaagctgtggaatttttactttgcataggatttcttcatccaatcagcagccctttgcagatacctacaatgtgtcagaacctgcttaagccttcacatctaggaaggctaaaggttgagtttgtctgtttcatcctgtcttggctgatcacatgcacatacaaccacacactcacttgcatacaaacatataagtatgaggagaattcaaaatgttcatggaaaaatgagattaaaagataaaagtttaaagatgtaaactttacttctcaacataagcaccatcacattcaagatactgttataagctatgatagcggccatttagtccatccctaaagaactgagggtcctgggaatttaatcacatcaatgcaatctttcttacattgttaactaaagaaaaatgggtgccctttgaagatttttaaagattaagtaacaaaaaaaaaaaagtcagaaggagtcaaatttggactataaggtggatgcctaatggcttctccatagaaattctcaaaaaaattgcctttgtttgatgagaataatgagcaggagcattgtcatgtcatgatggaggaagactctctggtgaagcttttcgatacattttttcttcaaaagcttgggctacctttctgaaaacactctcataattagcagatgttatcgttctttgaccttccagaaagttaacaaacaaaatgccttgagcatctcagacaacggctgccatgaccttggctctacactggtccacctgctttgacttgtccacttttgctttgactggaccacttccacctcttggtagctattcctttgattgtgctttgtcttcaggatcacacacataaggccatgtttcatctcctgttataattctcaaagaaatgcttcaggatcttgatcccacttgtttaaaatttccattgaaagctcagctcttggttgcagctgatctgggcacaatggttttggcaaccactgagtggaaagtttgctcaactttaatttttcagtcagatttgtgtaagctgaaccagttgagatgtctatgatgctggccattgtttctgctgttaatcattggtcctcttcatttaagtcacaaataagattaatttttttctcccaaattgatgtggatggcatatcgctgcaggcttcatcttcaacatcatcttgtcccttcttcaaacaagttatctgtttgtaagctgctgatttctttgggacattgtcctgatgaacttttcataaagcatcaatgattttttcattcttccacctaagcttcaccaaaaattttggtgtgtgttcttgcttcaattttagcagaattcatgttgctctgagagaggatcttttcaaacatgtcttatccttgttagtgcctcaaactagatcctgttcagatatatcaagttagtgagagtttattttggtgcaaaaaaaaaaatttgaaatctatgtatagttttttcatagcacgtatttttcatggaacttttggaagacccgtcatatagacacactcacacaatggatgcatgtattgtcagtgaagttatgttggcttctgaaactcaagggattttgctgaaactcatgaaactcaagggattttactgaaaagtctcagcctcaattggttcctcttacatttgcatattctgtctgccaggtggcaaggtagaattgactgtaataagaaagaaactaccattgagctccaattattgtccatgcctcagagttgatttttaacctgagagtgacagcagccacctgggccaggggcagacaggtagtttgcctcacctggaatcagaggctcccctatcagccttatcttcaagaagctgataggaatgctttgtttttcttttgtgtgctggacaaggagaggccccggaaggtctgtcatgtagattgacagtttccttttgtaagactggccaactgaggccaaagttgaaaatgtcagtaaaaacaaatagtattgcaaaagggccttatgcatttccttctctatcctctcattgccccatcagccgagtgctgcatgagtggcttaagagaacaccattaggcttgaaaaagagtgaactgcaaaaacacattttctccatttcacctagttgttattttccccccatgtgctaatgatgcaaacaaaagaaaataaaaataatagacattggcttatgtcttttcaagttccatttcttgtttcttcttttactattttcagaatcaaggaagataatacagaattttaacagttttcttacctcattttgcatttgttagacattgtttcctcgtggttgagacctgcttcctgctcaggaaagagaaagcagtggttgcccatacaattcaataataatgactctttgtcattatttaacagttgtttaggtgtgcctctctcctttcttcagttgcactaatgatagaaaaggatccttgggcacatagtaaagtggttcaaatcatgggtttgggtggtaaacaggtctgagatagatttcctgctctgccacttaagagctgggtgacgttggggagtcatttaatttttctgagcttcacccataaataatacatacatacataaaactcacctttcaggtttctgaagatgatgcaacacagaatctcaaaggtactgggtacccagggacactgcagtaataggtcccctctcctattgctgtcagctcagaaatacagaacagagcaactgggattcagaaaggagactataggctctagatagaggtactcactcacttccttgggcaactcacttccctgagcctcaactttcttgttggtaaataagtggaatcttcctacccaccactagaactgtgcaaggaagagatggagctggttaatgccagttctgtctgattccagacctggttcttaactaacaacaaggagtggtgcctggccaggcacttggggcattgtcccaagaggatgtcaacatgtcttcttagagaaggacagtcattgaggcctgaggaagtgttcaggaggaataagcttcaccaggatagtttcaatgacttaaccctttgcatgcagtttcctcaagtgtaaaccgggggtcatatagtcccaggagttttcaattacagcctttgaagtcttttgagattgttacacaggatcaagtagaagaggatgatttctagctctctattggaatttcagattaatgtctacaaaactcactaaagtccttgtattgaataattctttacccaactgatagcagttaggcttcattttcaatgccattaactctgagagcaaacgacaggcttttggtctgccaatatattaaaagtgtgtttctgaggaaatttcaatgagtcattcgtttatataacaaatacttgttgagcatctactttctattgggtactgttatagggattagagataacagctgcaagcaagtaaaaggcccttgctttctcagagctttcattccaggaaggagagaaagagagtaaccacacacatcaatagatgaccaggctgttgtgaagacacaaaagccaaatgagttgagggagagactgggggttagacaagggtgtttagggaagcactctaaagtgaggtgacgtggagttaaaattctgaatgataaaaaaaatgaaccacctatgtgaccatttgaggatggaacattccagacagagaggaaggcagatacaaatattctaggatgggaaggagctcagaatgtctgagagaattgaagacaagctttgtgcttagagcagagcaagctactttgaggttagagagggagccaggagccagattatgttggttttagccataataagaacatttatactgggtatgaacataaactcttggaggttgtaagccagggagagatcacttgattgtgaaaaaatgctcataacataagattaagtggaaaaatgactcttaaatctagaactgtatattcagtaccatttcaattatgcaagcatatgtgtgagtatgtatatttgtgtgtatgtgtgtatgtgtatatagatacatactttatgtatatatgcataaagtacgtgtgtgcatgtgtgcacgtgtgaatgtgtgtattcagtaaacaaactggaagaagatatagaaaagtgtttgctgtagtttttgtagtggtggacttattttccttcattgctttcctgtgttttgtaagttttctgtaagtttgtatgacatcaataatcaaaattaaatcatttgctttttaaaaactttgttgcagagcaatcaatggagagaatgtaagagtgatattattttaccatgtcttttctcagatttgagcttaatatcatggtgctttggaatgctggagtgaattttgaaggctctggctagcagagaagtttatttggctttttgtttgtttgttctttttttttttttttttttgagatagagtctcgctctgtcacccaggctggagtgtagtggcatgatctcggctcactgtaacctctgcctcctggttcaagtgattcttctgcctcagcctcccaagtagctgggactacaggcatgtgccaccacacctgactaatttttgtatttttttttttttttttttttgaaacggagtcttgctctgtcgcccaggctggagtgcagtggcgcgatctcagctcactgtaagctccgcctcccaggttcatgccattctcctgcctcagcctccggagcagctgggactacaggcgcccgccaccacgcccagctaattttttatatttttagtagagacggggtttcaccgtgttagccaggatggtctcgatctcctgaccttgtgatccgcccgcctcggcctcccaaagtgctgggattacaggcttgagccaccgcgcccggcctaatttttgtatttttagtagagacggggtttcgccatgttaaccaggctggtcttgagctcctgacctcaggtgatccacccacctcggcctcccaaagtgctgggattgtaggcatgagccaccgcgcccggccttatttgactttttaaggagtctgtcctaaactgaacttattactgtctccaaattatttatgcaaaagaatctaacatttctatttcttcccatagatttgaatataacctgccgctttgcaggtgtattccacgtggagaaaaatggtcgctacagcatctctcggacggaggccgctgacctctgcaaggctttcaatagcaccttgcccacaatggcccagatggagaaagctctgagcatcggatttgagacctgcaggtaagagaccagcacccgaccactggggaaagctggcggcctgggaccaggcagctgggcttagaactggaaggctcctttcccacagctgaatggattattgcctaaggagtcaaccccacgtattaatttggccaagtcaatctgcaacctgtatgacaactggagtttaaagtcagctaaagacacctttgtgaatcatagagcgggaacccagaggaagccattaggggtcctctcggctggaatcctcttgtctaacctgcttccacagagctctcctggctttgaagaagctgcagtatcattgtcagaaccacaagaaaacataaaccaaataacagtgtttgaaataaatatgtggctgttagagtcttggccctgcagacttggatcaaagcagacttttcaaactactctctcttactctctcttaaaaaaaattttttttggtttctcttctatgtttctctggtttgaaaaagtaaataaaaaggcatgaaagttattaagctatattatattaagatatattatttttgggagccctgagagggctcctaccagttattctagagctgcatagagccttcctcaaactatggctccaagcaagataatcacaacaagcaaggactttattttttgaatttccaatggccttgcggtaagcggtgcacaagaagagcaagccacggtggcaatcacagtgaattgttgtggttcgatttgttttcactagaagaggactgagtaacctctgcaactgctctgaagtttctaccccagcctgtagctgtgcttttgcagtgtctttaggtaatatgattcccctttctctgcaacacacactcacatgcacacagactgcttttgaaaagtcaagctgcagaactctacggaaaccatgaagtgtaagttaagtgcttctatcctccaacactgggtacagtcatgcacccacattatgagtgatggctgagactcttgctgaaagggaaaaggaaagtcttttgcctaaaattgccctgtctgatatggtagccactaaccacatgtggtgacttacacttaaactaattaaaatactaaaattaaaactttagttcttcactagcactaactacattttaagtgctcggttagtcaccgatggccagtggctactgtactggatgacccaggttagagaacatttccatcattgcagaaagttctattgaggagcactgctctaaaataaagagcagatgtacatagacatctgtatgtgttcagagctaggtctgggggaatatgaaaggagcagagagagggagaaagctctggtggctactgaacttgcactgtaggatgcaatgaaaaaaggccatttagcaaatccattattctattcccaaggctaattgtttaattatggccctgactaggccactggcctaagaaagtgaatttagtaagctgaactttgattgtgaaatacaaacaaggcatacttgcaaaatatagatatgctgccatgtgctgaggaccaggggagttcttacaactgccactggccaatcatcaagcacttagatgctgggagccctactgcccacctggccaaacccctcacttaatcctcaaactgcagtattggtcaatattatcacctcattttatggatgaagcagccgaggcttagcgaatttgcacacacagcctgcctatggaggagttaggattctggttctgcttagcctcagcccaggacaggattttaatgaccaagtcctcctcaggggcttaaaaggggaggaaagtatgcttcctggatttgctgaatattctttcctccttgtgaacagtaacttactcatgccacatacacacatataaactttaatatccccaatttacagttagcatgacccataaaaccggtaggcaacatgaggtggcaaaaactcagtaatagcttacaaagagaatgcaatagattctagaatgttggtgttatccatacttgatgacatgatgtgatgggggtgagttggtgggtaggttcaccaagaagtattatttagaaaaactgtgccaaagaaatctatcatttcacccataactggtattaagtattgcaaaactcatttccataatttctctcaggtagctatgaatcagctttctgccacaggacagatggcagagtctcatgggttaggataaaaccttagcagctactctcttttgtctgccccaccctgattggtagcaactcttagatatatgaaaacttattaccatttaattgtgcccacaccccctgccaagctaaggaggctttggggaaaccagtttgtctgttcagatgagaaattagtcatgcgagctacaattgccacataggtaggagttctgtgtgcttggaaacttcagactcacagacatttccatgggtcgtgcagggtgatgcactccatgctgttgcccctggcaggaaagatgaaaagcatcaatgtgcattttagccagaattgcattttgaaaaacctgctggatttagcttcctcctctctgccctcctgctgcaccacagcttcccttgcacatggcattttctcagcccacatctcattttttgaggcattttatattcaaaaaaaattgtgtttttagcacaattaaaaaataagcaagtttttagccaccaggatgctgctagaagaggctgggctgtgtatgttgtatctgtatgtcgtatccagctgtaacacactcccagagataccttggtggggagagaggggctatgcatttctctggctgtgctacttctggaaagttcctgagctacatgagccgttgctatctgcttacttaattgctatgactcccattgtaatgatggttaatttattcccactggcaatagaattatgcctgcaatgctcaggaggcagtgtgctgtgctgtgtacttggcatataaacaaggcttcatgtttagggcaatggagtatggagtaaggggactcacaggaaaagttgtggctgagaaagaagtgggggaatgggacatgaggcaggtctggaatgtgtgcactgaaataaagaagcaccccttcctatctatggaagctggccattttgtgtattttctggaaaacatgaaggtattccagagccagcatgaatcttacatcaaaacttctctcttctgtgactcaggcttccttctgtttgttcaaatagactcaacactgctgaacacaaattttaactgaaactaattattcctttcatgatttttttttaaagctctttataggtctctaaataaaatcactttgtttctatcagtcttgttgatctctttccctctctatgctgttatttttggatttcaaataactcggttgttgaaacctccgatatccctaggggtgaactgaatgaagtgttgcacggcattaaatgtcattgaatgggatattatgaaattcccatcttagccatttaggtcaatatcctgttgtttttctcttacaggtatgggttcatagaagggcacgtggtgattccccggatccaccccaactccatctgtgcagcaaacaacacaggggtgtacatcctcacatccaacacctcccagtatgacacatattgcttcaatgcttcaggttggttctcaggggggtgtctgttggcgtgaaaggctgtgggagcctggtctttggagctcagcttaagtggggattcatgtagcctccatttacataacaaatgctcactgaatatctgtacagcagagccaacattcctgtctccatggagcttacatgctaaattggggaggcaaacaataaacaaataaatattaaataccattcaggactgtccaatcttttggcttccctaggtcacattgggagaagaattgtcttgggccccacataaattacactaaaactaagagtagctgataagctaaaacacaaacaaaaatcacacaaaaaaaatctcataatgttttaagaaagtttacgggtttgtgttggaccacattcaaagtcatcctggaccacacaaggcctgtgagccgcaggttggacaagcttgccctatatgaagtctgaaagtgataaaagtgctataaaaaagaaagcaaaatacgaggctaatgagtgctagggatgcttttattttctgagaaggtggtcagggaaagtgcctcctggactgttctgagaatatcagtgctcagaagggagaatgccaaggaataaagtcagagagctaagcaagggccagctaacggggtgattcattctcagtgtgatgggaagtcattacaggttttgaataagggagtgacatgaatctaatgatagctttggggtgtaagtcaaatgtcttagctgagaggtatttattatatgagagggctggaaaaaagccttggagagtatatggtatgcctttgaccttcttaaatatcccttacccaacagttgaaagaaccagagaagaagaaacctaagttaagatgtagatgctaggacacaggccagcctttctctatgtctttgtgactttctcccaaccattaacctagaaaatcaggcttatgagccttattcaagtcctagcaaaattaaagaattctatgcatcatgaattttcagaattttttgagaaggatcaaaatataaatgtcaaatatctcgatgccaactatcaaaagtcttacctcttaaactgggccttctgttcccatggaaggtttgaagttgggtgaagggaaagatgaagccttgaggtaaacttggtacatcttgctggagtgtcagttttccctaaagatgtgaaggggatgttaaattagctggaaagggacttaagacattatcagcctgagacaaacacagatatatacatatacatatatatatatttatatatatatttatttatatatatttataaatatttatttatatttatatatttatattcatttatataaatttatatttatatatttatatttatttatataaatttatatataaattatatttatatatttaaatatatattataaatatataaaaattatatttatatataaatttatatatatatattatatataattctatatataatataatatataatatatattatatattatattatatataaattatatataatatatataaattttatatatataaatattatatattatatataaatttatatttatatatatgtatatatgtatatataaatatatacacatttatatatataaaatcaagatatcacagatatatataccatatacatcaaatataaatatacatataccatatatatggtagtaaaatataaaaagctgcatggatttttaaactataaaaaggacatcaacttaattatgagatctttcttctactcactactaaaaaaaacccaaaaattaaaattaattgtgagattacatcagtggctttagtctacaccacctaccctttgttgtgtgaacagtagggatcagagtggaaattcagagaagaaatctagagtttaggacaaagtatcagggctggctagttgaaatggagtgcgtgaagccagtagattttgacaaaaatttacaggtcactgaatctatcgagagacatacgaaacaggaacagaaaactgtagaatgtttactcctccctgttatatgagtgaagaacacaaatggagtttgactaaagggaagggagtccaattaacactaagtagtacacgactcatacatactcagttcccatacccatgtctagcatgtcgttctaatgatattataatgagaaaaccacatataaaaaagtaagaaatagacatagagcaacatgtggtctagctagctccatctcagtgcaacaggtcagagggagacattgggaaaagcttgtgctttagatgaagaggttgactcattgggaaagggctggcatgaggctatacactcctgagtctctgggcactgcttattgcatctcccattgagtcttgctgagtgaatgtatgcaataaattatgtagttgcatacccacattgtcttacctgttttgcaagttggtttcacttgctaaaaggaacctcaactcagatagaagctcacactgttttattgcctggcatcgaagccatctaggcaggctgcgactgagacttgtttctatccttaattttgttcatgaggttgggcccatacctggagttgggagcaagagcattgattaattttcttctctttggagggttagttcagttgaaaagcttgagaagtacagggggtatgttccttactaaaatggatgaattaaataataaagctagaagtaatatttttccttttgtctattttccaaattgactcgatattgatggctacttttgtaagtttttatttaagtttaaagggaatatttattgatcacctctatgtgctcagtactgcactaggcagagatggagtaagaaagaactggaggctacatttcttgtcttaaaggagttaacaatcttgttgaagcaatgagacaaaaaaaaaaaaagaaagaaactggagaagaggataaatgtgtttaaggataaataaattctgaatgtcttggattagagtcagatgataggggtattaagtgagctaaagattttgataaactgccctatgcaaagatttcattgcaaggatccctgaatctaatttagcctgaaagctgctagcaggtggtcatgtcccagtgctgtgatcccccccataaaacggctacagggataaaagtcagcttgatcttagtagatagcttccataagcttaagttttagcagtatttttagaaaacatggcctgtggctaacaaatgaaaataaggcagaacttgaaaaggcctttgtgattttttttccctcattttcagtggttgaggcccaacgtgagcctggtgacttctgtgtgaacacagaactgacttgaattgattcatttattaagcttgctttcagtcaagtgcctcattttcttttgagggtagaattaaagggaagattctacatgtacttgtttatccatttcctcctttattcaacaactatttgagaatatttatgagatacctaaaatgtatcaagcattgaagagggtgcctttctatctggcaaccagagattagtggttagactgaataattaatgtttctcttggttattttggtgtgttgaagccaaggtttatgagaaagcccacctcagagaatttctaacaagtcctcagattcaggaacacctcaccaggtctagctttccaagcagtacagagctcattaaatggaaagaaaggctatctaataaggccctggaatccgacatgagagcatgagtctgttaattgcacatttgggtcaatccactaagcatatttgccagatttgatgttctttataaaagttaaggtgaattggagcatgaagggggtccatgtgaacaaatgctctaataatttacaaaactgtcttagggtttgtgacatcatgctccattctattacaacttgctgcctggaaattcccagtgtactgttacttgcagttatatttgaagttaggggagattgtttcatccctggcatcaagaagccataatccaaagcctggttccaggtatgcacaacatacaaatatcagaagcatctcataggttgcgtcagtttctgctgatatttccaagagaaacaagatagatactcccctaaatctcccaggttggctatatgcccttattttcaagtgtaataattttggaaaatatttttgaaaactgtaaaaagctaaattaatattaattattacagtcccccatgaccttgtgagtttatcagaagcagggacagaaacatgctcatcttcttttctccttttatatggtctggcatataagtgttgagtagatgcttaaaaataataaatgaagagttatatctgtaacttcctttaattatttcttatggcattaccatttaaggataatctaaatgcgtgacctgtacatatttggagatgcatttagggggctaacatcttaggtgtgtttactggaagaatagacccttgggaaattatatcggtacttttttcttttttcatccattcaacacatttttattgcatgtttctctgtccccatcacacataaatgttctggccaagacagataaagttattactcatctgtggagcttatacatttctagggagggaggcaggtagcagaaggcagagattgagagaagtgccatgaacagccatcaagtaagatgaacaagataagtttatatggtggtaaacatgaagaagaaatgagagcaagatgctatgtgatggtgacaggtgtgggggagtgatgaagcagtttagattggatggtaaggaatggcctcgccaaggaggtgatacttctctttaaagaaatctgagaaatcttttaggacaggctttgcaagaatggtgtttcctaaaactttctgtttttttccaattgaatgtataaaactgccagttagttccactaactgcccaaagaaatgggcaggttaaggttatcctttttatctgtgggaaaagatgctcccaggtactaggaagcaaacaaaacctgttttgttcaacttgtgtttctatccacttttataagtacacaaaaattatagcaggacacttaaaatacttgtgataacagcctttcttgtgatagcagtctgtctgtctgcctgcctgtcttcctccctccctctctccatccatctatccatccatctccatccatccatctccttcttcctctttgccaggagcaattctgggagaaactaacctaacaaataaatttccattttaatttaagtatgcacacacacacagaataaaagctgtaatgcacaaatggacttaacctttctataaaggcaaaaccagtttaaagctctctgaggttttagagctcaatacaaggtatagtcacagaataaagcactttggcatgaatagaaggttgcttcagctacactgcagtctgcttttaagacacaaggaatggaatgcagggtggaagtttcagggcctgttatcagaccgcttgagacagtgctgctcagagggctaccagtaacatctgtggatgatcagtcaggcccaagattcaggcagaaatctttattcctaaagcaagggatgaaagagtagaggataaaacgagaacaagagaaaaaaaaaaccagaaatgcccatgatgagatatgccaaaacagtaaccttgaaaaatattctgggcacctaggccaaaggtggtcaacctcagaagcaacatgctgagaagcagtctatacagagtaagcacctaaaagatcagctaaattaataaatacattattacattaatgaaagactagagattcatttggtttttaatatttcaactgagtaaattctttgttgtgattatgttattttaaccttcagattgtcatgctgttcatgttgataaacatttgattgtgtgtctgccatgttttctcatcatttctgtggacttcccagattataaatgattttctcatgatagttcatactttacttttaaatttttttacaatgttcctgcattacttttgtaatcacaaattttaaaaatcctccctaatgtgtttgcattagagaaggagccgtgtctatcttatttaaaattgtacccccaggcttccacagtgcctgatatagaatgtatatttattaatgaatgaattcactgtggtgggaaaatttccggaaacttcataagttccagaaatttatgaaatcaggtaaaaacggaaaatccatcaggaaaggcagagaaattcctagccaacttaggagtttcggaaaaagaaagttatttggaataagttatagtaaaactccattctaactgactaataaaaatgagggtagattttcctcatgtttttaaagggttctcatcctttttttcctacctcatagctccacctgaagaagattgtacatcagtcacagacctgcccaatgcctttgatggaccaattaccataagtatgtctctcttctaatcttaattaaattttcctattttggggaaagggctcaggtgtgttctctgtggtatatttgaatagaatattaggccaggtgtggtggctcactcctgtaatcccagcactttgggaggctgaggtgggtggatcacttgaggtcagaagtttgagaccagcctgaacaatatggcgaaaccttatctctactaaaaatacaaaaaattagctgggcatagtggcaggtgcctgtaatcccagctgctcaggaggctgaggcaggagaattgcttgaacccaggaggcagaggttgtaatgagctgagatcgtgccactgcactccagcctgggcaacagagtgagactccatttccaaaaaaaaagaaaaaaaaatattagtcatttccctaagactaagtaaggacagttggctttaattcagtgtcccttcctttttttctgcaatgacttgaaactgctctctggtttacactcatgcatcgttcctcaaacttcagtcatttgaaaaccactttcacattttttttggcatctctatatgtacaatgctctcatttacttgatatttttatttaaatgatccactgttttctaattaaaatacacttatttttaaaaagaaattgcacatggaaaaccaacatcacatcgtaaatagaaggcaaccttaataataaacttaaatgtaagaaaaattaaataatgttcttaatttgcagctgctgaaagctctgggtctgagtcatgttctctcttataaagagggattaataagtgtcaggtgtaggggcattttggccctaattagcaattttctgtttgatataactgaagtattgaaagataatcatgaaggatataaacttcctgatacgtgttttgacattgtttataccacatccatcttaaatcatcctgatatatgattatccacagatgtatatattcgggcactttttaaaaatagacatgggggtctcactatgttgtccaggctggtcttgaactcctgggctcaagcaatcctccttcctcagcctcccaaagtgccaggattacaggcatgagccaccatgcctggcctattccagcactttagaaatcagaaaatctcaaccagaactttcaaataggctaactgctaaccctgatcttacggcctctgagcttcatttaatgggaaacagtacagtgttgagaggtctgatttctgcttcctcacagctggatactgacagtgtgcacaggcatgatgttggcagtggcagagggatgagaatcttcgtagaccatacaaacccagccccacattgttatgtaaggaattgtccctgacctgtgccttgcaataggaaggggaggcttcacaccatgatggctacgacatgagatgtgctgtctcagcaggcctggtatgaaatcctagttccctcaccatgtgtgagattttagaggagtgactgatcctcagttttctcattcatataatggaacaacctatgagaatattcaggaaatttgtaaaagacactatgtctaatgtatgtccagcccatagtagaggtttaataaatgccctgtttctttgatgcccacagttctcttttgaagtccagacatgtaagagtgtggtcaacaatatttccttgtcaaatcctcacctgcagagattaccagggtgactgagaccttgattttttttttcatttatgtattattaatagttccacttgaggcttgccacagtggctcactcctgtaatctcagcactttgggaggctgaggcaggcagatcacctgaggtcaggagttcaagaccagcctggccaacacggtaaaaccccgtgtcaactaaaaatacaaaaattagctgggtgtggtggcatgcacctgtagtcccagctgcttgggaggctgaggcaggagagttgcttgaacccaggaggcggaggctgctgcacactgagattgcaccactgcaccccagcctgggcaacagagtgagactccatctcgaaaaaaaaaaaaagtttcatttgagcaagctaaatatgtggccaaaaagaacctttagtcccatcaatgcaatacagcagaaaataatttcatctaaatgcacacctgcatagtgagtggcccagacttgagagcagcaaatacttctagggaggaataatgaatgaatgcattcaggctttttcttctccaattcattctagtcatttgttgaaaccacagatgttgatcttcatgtatatctgtgcttgttaatttccaggttgaatttcacagagaacggcaaatgctcttctgtatttagacctgctggtttcctagccagaagtgggtgtttgcacaagtggacaaaacttgccccttaaaaaagaaaatcaaaatcttcatcattttgcagatgtatcttccctgctgaggctattagtctgctacttcaaatccttttcggaggaatatatggaattaatagcaacacattttatatgtacttcagaagggagagtagggaaacaagtgggagaatgattatttattgagcatccactgtattttgaatactgtgctgagcactttacttacaatgtatcacataatccccattttacaaatgaggaaactgaagctcagagttgccttgtccagagctctatgaagctaggattcaaacacagggatgggactctccagtacttccttgtttcctgcctcatccccagggtgtgtgggggatgggagggtgcactttcttagtgcatctgccactctctcccaccactggatagataggtgtttctcattacaaaggaaaatagctttgaagtcactatgttaaacgctaatccacatactcaaaatatgagctgtgaagttctgtaagtaccttttctctctcccagctattgttaaccgtgatggcacccgctatgtccagaaaggagaatacagaacgaatcctgaagacatctaccccagcaaccctactgatgatgacgtgagcagcggctcctccagtgaaaggagcagcacttcaggaggttacatcttttacaccttttctactgtacaccccatcccagacgaagacagtccctggatcaccgacagcacagacagaatccctgctaccagtaaggagaataaatcactgtgcttcccaatagcaattccctggcaaaatgtctctgaccttcctgagcattgcacactcacgtgctgattttctcgtctctagacagctggaagctggtgatgccattcagggaggtgggctcttgtggttgtcagtaaactgcctgcattgactactactgcctaccttttttcctcatctataactgtttttcttaccttagcataagaagtgccatattggaagttttattttggggagagccctccttattctcttatccccaggtatacagtaacaattcaagcctgatatgaaaactgttttcattttttcatgtttccttcttgttcttatccacctatggataagattgttttcataaagttgggatcatagagtttgcataccactccactagcaccttttaaaaaacccacttatgcctgaggttgcaattttttgaatttttgcaatcagaccttggtgatgacaatgagcagtaggatataaataactcccacatgcttagctttccaataatggaacagtaggcatacgtgggtcaactgtggctttttatgttttaacttgatttacattcatactattgatagtgtaatattcagtgattttcaccaacgataatttactcaacaattcctttgtttttagtccaaggaagcatatctggaagagttttctggtgaaattaaatcagcttaagagctctataatccagcctgttggggaatgttctcaatacttacttggtgtgtgggggtaattcattacttagggttgcaagagtggaagtatgtaaacattgcgttccattcctttggagtttgcccctcgcgcttcagctccactggaaagtgtttacatctctcttgtctcctgtttccctctttgcttttcttctatggtttgttttgaaatgggctcccagatgggccatgttcctcctgtggaggattaatcaaactcaaatagggcatctgcctctggagcggttttcctagtatggtgtggatgttctcttttcctggctatagctcctgaggggtgaaacttgggcctccaaagagtgtggcagaaatgcgctggcttgtgaatactcaagacagggcccttctctattccttgtcacccagaagccagggaaacccccacagtactgtgatttcatttaaggtcacttgcgcaatagtgttttaaatttctgtcagtctctggctgagggcatgatacaaataggcttggggttcccatcactccctgcacattctttgaagctttttaaaaagcagagttttcaagctgcccatactttcttgggttattggccctcttgagtttgcatcggcttattgttggtagtcccgtgggcaacccttcttgagagaggcttctgcaaaccaagcgggccgtgctgctagctactcactgcttcttgggttccctgtctttttaaagtaaccatgtcgaaggtgcttatcattatggtaggcaattttgtcggatgttagcgaacacaataattagtggtctcagcaggaaggagaataggtctaccctaaagtaccacttcccaccaaagaagaaaatcctgataaaacataacttgggactatatgtagttaacattcaaaccactaatagcctatataaaatagtatttcatgtgtgttttaaaaacacacatttcattaacccctatagaatatctcttaagaactgtatcttcccttcctaagttagtcagcaaacgtattttgagaacctactacgtaccaggcctattagaatgcttgggatcgaaggataaacatagttaggaagtaatattgaagagaggcaaggattactgagatatttattcattcaatcaatatctgaggtcttctgtatgccagacactgctctaggatgctaggaattcagagttggacttaccttcatggagactacatattattggtttagaaatcagggaaaaggagtgtttatgagatttaactaaaacatagttcaggatttgagctgagaaatgaattgtgcctttctcctcccagataaattagttaagtttccttcagcagctaaaaaagaaagagactaatgagtctaccaaatgagtccagggctaacctgagagtcactgaagtactataggacccaatgggaccagtagcagctccaagtggatcacttcatgcaaagaaacataccaaggcaaacaacctggtggaaacttgaacgtagcataatggcatgccaggaaaagtcagcactgttaggttcctgagtagaatcgtatttctaaagtccagtgaggagatttgcaaaaccttatcactgttggactgagagctgggacagagtgacagggagtgattgcaaagcctccctcatgcattgcaggagggcaggggtcaagaggagtgctggctgagagcacagaagaagcggtctttggctcggctggctcattccttcctgaagggcctgtagtgggtggcaatagggacagctagtaagaataaccatctgggtagctttaggcttccagcaggctgtttatcttgagtgtcatcagcctcttcctattggtgacctggaactctctgggatcaagaaacctaaactaattcaggaagcagactcctgccttggaacactgtatttccttgtcttctgggtgtcaaaggaattctttcttttttttttttttttttttcagatctggtatggcctatttgggtggggaaaattagaaattctgctggctaggcagtagctttttccatttttccccctcataccactcctttcaggaagacaaaaataacgcctatttctatcttgttcttgtaggtttgtttcctctggtactattttttcctgttgtactattgggtgagggtggtgggaattatgcatctttaataaagtttctgaggtgagaatgtggtgtctgtggattttcccggggatgctcaggtttgtctggaggcttcatgggtaaaattggctcctatttctctactctctgttctgaactaatgtgtcctttgcagcaggggtgtccagtcttttggcttccctgggccacattggaagaagaattgtcctgggccacacataaaatacactaacactagccatagctgatgggataacaacaacaaaaaaagcttataatgttttaagaaagtttatgaatttttgttgggccacattcaaagccatcctgcatcacaggtggcccacaggctacgggttggacaagcttgatttagaggacagaacatactgtgccagctgttggcattttatatagatagagtcaaagtttttaacctagggttcatggaccttcagtaggttcaatggtagaccataaggcattctagaactatctgaaataatatgcaaaattttgagtgtgtatatgtagcatcacttttttgaggaaggaggacataacgtagattttcaaagggatatataatttaaagtggctttttaaaatctcagctggcttaaattagatatttatcctgatggtttttgccattccatttcaataagaaaacatgctggactcaagtcaaacttgagagtcgaatgagagattttaaattgcaaaatgttactgatgatattttctctaatttgagaaaagtctggaatttctctaactttggcaactctagtttttggtagaaacacatattgaattagaataaaaagtgacagaaatgatagatggatacctgaggaagttttatctgatttcgacactttgaacacattttctttgcaaagttcctgctcaagtatgaagtttgacctgaggctgatgcgtgtgggcggagctttgaaatgccagttgtcatcacaaactacctgggtacaatgctagacagatgtgaaaaatacacactagcaacccaaagataatccaaagataaatgcatgaaagcagtcgtttgaaatgctgcttcgaaaacctccagctcatggctcagtcgcccaatcaagtaaatagaaaatctctttccttcacaggttattaaattgctgcttgattttgctttgatcatgaattcaggggattcagtttgaagaatgagtagcatgaaatttatacccatgaggaatttgcatttctgatgttgtcctaagattgtgggagacattaggagtctggaaagataaaaccaggcctagattttcttttctaattatcattcaataatagatacagacatcatatataggcagaactgaaagtaaagatttgtagagggaatatcactaagtgatactttcataattgatccagttacttcaactgtgcactcaaacagccacgcaacagctcaggagcaaaataactagatatggtcctggtttggtaattcacagcctaagactcaggatctcacaacaacagcaacgacaggtaaactgctttgtcttttgcttatcagctctcctggatgtcagaccttttagtgttaggggagaggacgtccattatcacgtcaaatctccttcatcattcttagtgagaatagggtcttgtaccacttcatatatcagaaaggcctgtggatctggggatatgattgatattcttaaatgtcctgtatgttttccttttggcaatgtgtatatagaatcagaatgatttttccatcagaggaaggaaaaactatgaatcaatagttttgaatgaatgaatgaaattatgaaaaactacaaatgaatgaattgactgtgtgattcaatgagaaaatgtcctttagaaagaagtctgccggaaagtgcaggcttctcctttctgctgatctgattctcacagccagtaataagagaaggaaatgcagatttctctcatcaaagtgtaggccctgaacccttctttggacacttaaaatctcaactgtaaagtgtaggaaatgacctgttgctccatatcagaatctaggcctctaaccagctccctgggtgtgtggctcttagctctatatccctgcaaagtgtattgttacaggagctttggggaaaaacgattcaaggcctgtaaatatgggagattacaaggacaccctcatttattaactttcattgatggagttaatggccatatttcaaaataactaggcattctttctgcagagggggataataaacatggaaaaattattctttacatttgtttgccttatatgacattggataaattatattctttacttctataaataatcgtgaggaaaatagtgctcatgttatgttatggttgccatatcacaatgtctaagatcatgcaggggtggggaggggggatacagagattgcagaataaagacaatgctatttttaaatgttgacaatgtttatcttcataggacaaagaatgtgaaggaaaaggtctttttggcagtgtttcatcttcttggttcatttttgggctttcttgatagctgaaaaaaaaatctaactcaccttactattttgtttggggatgatggtttcagcctctctgcttgaacttgttctcagttttttgtctactgttagctcatattcttccaatgcacatttttgggcattattggttatagaaatggcagtctttggagatttttaaatcaagactcttgcttctggtcttattagcaagatcattggggtcacttcatctctgtctgtctttcctgattgattatcctattttcaaagaatgagactcaaaatgtcctgttctgctttgcaaaatatagtttcacataagaaattaccttgggcaaggttgtgagaggatttggaatctaaatggagaaaagtgtagaggcatatttttcaatcttctacttctatgtcattttccctgtgtgttggattgctaagattatgtatctattgctggcagaaatatcatatcctaaattcttggagaatgatattggttgcccaagattgtatagaagattaaggagctaggactctgaagagctgggttttagaatcataaactctcaggtttggaaaggatgttaaatggtctggttcaatcaacacttctaataatttaatctcttacacaactttcttgccaagtgatcttcctgactatgggaaacataatactttatgaagaagttcattgttggatagttcagattattggttttttaaatccaacatttggaagaacattcctcttcctgaaattttcaccacagatcctaatttggcctcatggatccagaggcaaaaaagtttaatccctcttttacattatatagactttcaaaattcaaagacggctgtcatgcgttcctggagccctcactcttgctaattaggcttctgacttcagacaggtcagaagctctgtccagcaaaatttttaaatctttaatataaggagcatgaaccagatgacatttaagatccttccctctctgacattctataaacttcagtttgagtctctgaaaaaaatggaacttttttgctttttccctttcttttcaccatctatatcaaatatagatgattctcttgagtagtaaaagagtacaagcatattcaatgctatttcttaggaaccgttaattaatctttcaacaatcaattcaatcatgattacaacagctttgatgagcactagtgctacagcaactgagacagcaaccaagaggcaagaaacctgggattggttttcatggttgtttctaccatcagagtcaaagaatcatcttcacacaacaacacaaatggctggtaatgagttattattatctcatagcgtatgttttcttgacagccttgaataattttgattgacctctgggatgttattaaagcctaacgttccttctattctcacaaattttcgttatgacttcagaaggatcattaactctggtatctgtttgtttgcttgtatggcaccaataagcagatttcttctttctaatctatggattagtatagaccaggagaaggctaatacagagactatgaaacgggaataagtttttttaacgatatggcaaaattgtgactctgaaagatcattcatgtatattctaaaattaccacagtcataaaaagtcttggactttcatgaggaaatagcatagctagatatgaaaaaatatagaaaatcttcatcaatggaactattcttggggtagacactaatcatatgaaaagacaaatgctcattccctaagatagcctgaatctcatttaaaatgtagaaaacccctttttagtaaagagacatcttctacagtaaccactgagaagaagtggaagtttttcatctcctttttttattcaaaaagaaaaagaatttctcaatttctgaaccacagttcactttagttaacccctttgattgcctaataatgccaaaaatgatttctctgttaattggcttcacatttttgctctatgctgaagtagtattgggaactgcagtgtagcttccatctctgtttggaggtacactgatctgatctgatactagagaagataaaaaatgaattagcaaattgtgaacacaatgaaatgactgacgtaggtgtagattccaacatttttctgaaggtgtcttgaccaaaaaaaaaaaaaaaaaaggcacgtgtgaaacctttccattctgttcttgatggcttggctttaatggcatatggttaatgagttaataataaacatatctgaaagtgtgggggagttttcattagcctttaaaaacttatatggtgagattatgtccacacttattctttcagctttcttaaagagaatattcagttttaaagatcatagccacttgttttgagatttatgtattagcttcggagatcagaacataagaatttggggtatgcaagtcaactccctcactttcttttaaaaatcctgggaaatccattataccttctgtgcctgattttcttcctttgcaagtgggttgcttggcgtccagctcagccactaatgcaagtcaccacaacaggtacgtcttcaaataccatctcagcaggctgggagccaaatgaagaaaatgaagatgaaagagacagacacctcagtttttctggatcaggcattgatgatgatgaagattttatctccagcaccagtaagaataatcaattacagtacagccatttatgcaaggcttattgattaatctgagtgataccaaattgtatctctcttgagaagtagttaatgtgaaaaatgggtgaacctatgatcataccttagttatatcttgatgagattatggaagaagaaatagaatgttttgagaagtggggaaaatatctcacaaaatttctcttgtctcatgttcttcctgttttatttatctatgggatctactgctacagattgtctttgaatgatcaggctttatcagagaatgacattaaaacagtacaaaaaatgtacattgtgtacttactgtgctaggtgctggaaacacgaagatgaaaagagccagagcctttgcttttcagaagctcatggtctgttggagcaatagacttgaagaatgtgatgaggagggtattaattaaaagttgtaggccaggcgtggtggctcacacctgtaatcccagcaccctgggaggccgaggcgggcagatgacgaggtcaggagatcgagaccatcctggctaacacagtgaaaccccatctctactaaaaaatacaaaaaattaaccaggcgtagtggcgggtgcctgtagtcctagctattcgggaggctgaggcaggagaatggtgtgaacccaggaggagatcgcgccactgcactccagcactctaacctgggtgacagagccagactccatctcaaaaaaaaaaaaaaaaagttgtggaagttcctaaattgaaggccctaaaggcttaaatgatgggagctagaactcaagaattatcttagttaatcaaagcccagctgaggtcaaaggaacaaatccagagttttaacaaatgagctggacaccaatatagcagaaagaccttgaagggaagggcaaatgtcaggttagctttagcaagacattgccacttattaaaagcaaataatgaaaccactattggtacataatagtatccaaatttttgacaattataaaactttttgagaacaaagagatggaaattgagctttaaagatatccttaaaaagttaaaaacatgcaaaggttggtctaatattctgccagattactgagttttccacacatacctgtaatgacttaagattttgctgaacagagctgagaatcctgaacctgactccatcacagttctgcttttccttagaaaaaaggcttttggggtgctgtgtgagctctcccaattcactgaagttctatccattccattaaaatctgagaatttcatcctcaaatggacagagaagaaagggtccagaaaaaaaaatagcttaggccttgaaggcatctgagtatataacattgatatgacaaatactcaaaaggaactagaattttctatctaaacttttaagtgattttttttttagacccgacacccctccagagcttaatctatggaataagaaaattccttttggtaacttcagaacaaaaaccaaataatcaaaaacactggagttttacattatactgtctcctgtgttcagcatgtggcccagctttgcagatgggcccatcagtaaatacgtggtcttgatactgaagaaattaaattcccttgggtggtaacccaaacagatctacctgtaaatgaattgtatggtcaggcttcagggaaaaatttcccatggtgttgtttttttttttttttttttttttttttaattttttaaatctctatggcatatttttccaatttctgcttttctttttttttcttttctgcttagcacctatggacataattcaacatgatgccctctttcttctggaggggtgtgataactgcttgataataagcactttttcaggcctattgagaatgtggttaatgattctaaacttgatttttcataacttgtaaaatagagctgacagtattatagttctgaaaacagttttgcgttatttgggtatcaaaataaagtttgaaacaattaggatggatttgcaaataacctttcacaaaacatgttgactcagattttgtcatgatccttctgttaggtgcatctcttattccagccctaacagattgggtgacaatatcagggtgctggtggatgtacgcctctttctttccagtgtgctgctatgatggtggctggttacctgtggtgtcttattttctttcactggctatgaatggcttgctcatgacatattttgtatttgatgagaataccatagtgtttgataaatattcagaaatgtatcgctaaaacatatggctattctaggtattctttttcagaatcatctataggaaagctctagctgctcaggcattcctttccccactgaaattactaacaacataaagtgattatcatggtataactttcagttatctgcctcttcacccggaggatctacaaacagcacacagtgactaagtccctgggctttcaagtgcagagggatactacagactgcatggatgggcaaaatggcgcctttggttatcctcggtggagggctggtgttttcaaagctgtccttcctactgctgcagcttctttgactgttttatctggaagatctcatgttctgaaccccaaggtattctatgacagaatgcaaaggacactgagatgcttaccaatatggctgaattaagctgaagtcaccctccgctttccctccatttccatgcagccatctatacaacctggtatagatgattcattgcatagcctacagaagcaagactatgtgcgggacaagtggcgaaggctcaagaaataacatttttctaattgcttcaatcatcgttatcacagtttcaaccacaccacgggcttttgaccacacaaaacagaaccaggactggacccagtggaacccaagccattcaaatccggaagtgctacttcagacaaccacaaggatgactggtaatgggttctgcatatttaatgaaagatttttttcccctcaaagcccatgatgctgcaaaggtcaatcatcgaggcacagtgggaaatttagttaatatctgatcaagaaattcttagtggacttttatgaggatacttaattccatttaggagtcatttatcaattataccatgtgggcacaggattttttatgttgcttcatgataaaaatgaatatgtttgaatggtttgtggttctgcctttgacaaactgatcatagtggaataataagggaacatgaagaaattccaagcccattgattttctcttgagaccaattaggtaaagtcactcaaaatttttgagagtggatgctcagaggtaacactttggcatagaattgttaaatagcatgcactttaatggaagaatagaatcattaaagattggttgataacaagtcacagtgtatttaaccatcatcacagcagatgtagacagaaatggcaccactgcttatgaaggaaactggaacccagaagcacaccctcccctcattcaccatgagcatcatgaggaagaagagaccccacattctacaagcacaagtaagcaagatggcggtcggcagttctgggttagatgaattagtaaagacattccagcaatagggaagattttgtttagaaattggccgcatcttctatttccactcggtaatttcttttattcttagagcctgaaaagctgctaaacccgcacacaaattttaaaaattggaaggaaaatgataactcatcaggttgcccaaaggccaaaatgttttaagaagtagatctagatacaatttttgtgttaaaggttcctagaggttccatttgggtaacttgtgtgtgttcattgaaatgtgtggcaaagagtgtgttcttttggtgcttagtagtggaatctggaaagaaagtttgtcaagtgaattgatctttggaatccttattttctatgaagatctttgatgaatacagtgtcttttttgcattctgtccctgactgttctatagaaagacatcccttgtactctttagagcaaagttggtagctcttatggtcttcatttgaattctaccactgcttctttttctgtttttaagcccatggtaacttggggaaggctttgatgctcttactgttatttctactattatgaaaactcaggttttccaaaacaatctcaagttgcggcagtggactgtgagaatagggggccccctcactccccaaacataagaagtatgtgcttttcttcttttatctatcccgctgagatatgtctatcttatttggaataaaagtatttattttggaaaacagctttttagcatttttaaaatgatgacccaactgtcattctcacagccctagatacacctaatggggaaatgtgagccacttaaaagccacttaaaaaccaaagggctttgggaatctatggcttgaggggtgccttcagataacaaaagaaaagtttcaggtatcagttaggatagaggttagacattgtactgaatatatccagcagatcttacatcccattacaaaccccagtaggtgtgttgtatacatacggcttaggggttaagttaacaaagaagtctgataagaaaaggaaatacagaggaagcataaatctctttggaataggattttgttccactcccttagagccctaacagtataccttagaaattattttagacagtttgtacttaaagaccagaaagctactttagagacttggaaataatgagcctattgtcaaaaggtggtgcttgcggggcattaggactagagggttggtgaaaattcagacagaatgtaacttgacaaagagaagacagcaacaactgtaacaattatcttatgaatatttgcgaaactcaaagggatctgattggtgacctctgggctttatcaaattaacatcacaacttctagaagaaagtcaaccttcatcttttacaatagaaatcatatgttttgctaacccattcctatttaggctgaaaacaattaagagttatgggtacttaaaaaaatcattatgtttataaaattagtgatagaaggagcatagtgttctatacagtcacacacatacacttccttatttcttttatttaaactttgagtaacatagcagtctatgtttgggtcagttttcccttttttgtaattacattcagtggtttttgtaacttcattatttattgggaattagtgatttagtcagtgggagttttgtaaaacttaagattttggcttttttccccctcctcctggataaccagttaacccaataatggcttggccgatggaagggtaaaatgaggacagttatattttttaaatgtcattactgtcaccaaatcacacatatcattttctaagataaggaaatacaaccatttttacaagttgcaaaaaagtactctggcttggcaagtttatagactctcattttcttgataaactaaaaaaaaaaaagaaattgctacaagctgctatagacaaaaatgttggtgtctttctgacttttcctgaagacaccttgatggaattatattctcttgattttgtcctttttaaaatgatggttgaaattttaagcctgtcacacactattatttatataatgcctcaaactggcttggatagttttcgtcaactgaattaattttgttaaaaagtgattttagcaattttaggtgccatgtggacatcaccaaatactgtgttagtggaatagcatccaagccatcccaccatctttcctgctgggcaaatccactgctggtgcatttccagtgtgtgcgattatgggttacatgaccaccatttgagaaggtctcctaatgtgctgatcttgttattagctgttatacagtgttttcctttcgtcaaaatgactggagcaaagaggttattctttgaatggttttctcagacagggtatgtgaagccattcactacagtaaaataaaaataataataactcatagaactatgagaattcatcagctatggtctgcttagtcctatgattttgaacaaatcaaaacttctttggaccacaattttcctagctgaaaaattaaacatttggatcatttgatttctcatatcccttttagaatatcagtggcctgtttccttggtgcctttcttttctaccttccctccccatgtgtatctgcccttaaagtagaaagatatgttgacagctattggtgaggaaaatagacaattatgtctcccaactgatattcttctcacagtccaggcaactcctagtagtacaacggaagaaacagctacccagaaggaacagtggtttggcaacagatggcatgagggatatcgccaaacacccaaagaagactcccattcgacaacagggacagctggtaatggatggtttaacaagtaaatttggatggaaacttccttttgggttaaacggtagacattgaggacattgaacaaaaggacactggaggaattgtcacgagatgttaggttacttaataaattatgctgcagttcacacagagccaaaccttaaaggctcataacaagtcacctgaacaggaatggatacaagccagttatgaataagaacaggaaacacagagaaaatgcccttgaacatgtctctttcacatcgagttttgggcatcatctagtgagattgtagcagaggccctgataaaatatcgctgtctgttgtataaaggaatctactctataatgtgggtccagactttacaatatgattctgcaaagtctggctgtgagaaagcattttgtcagaactccagtgtttgaagaaatagagccagacattatgtgaaaagtgacacctgtctgatgtcatttggccttttggccatgcctgttcagtaatttgtttttgagtataaaaaaggtatcttctctattcttgaattgtgagattgtggaaattggaatccagtcttatcatcatctctaagtgataccagataacttggctttgcaagctcccatgcaggattcttttgtctgtgtgacataagtattaaaatgtgtcctgccttataaagaatgtgaattccatattctcacttggtatcagtgagaaatattcccatatttctatttgcaacatagaagataatgcatcatgtccttctggggcatggcaagttctaaatgaattcctggcagagcaatggattctgtgattgtctatgtggtgtagttgttgctaagaggatgctattgtaatcttttctacctatacttcttcattggctcagaatgaagcaaggcatgtgctgctttcttatatgtcatttatgccataaatcccattgttagaaggtaatgcttctaacggattccattcatgcttttgagataaatggcattgactttcatattgatcacatggaaagctgttacctgattcctttcctgagatcacttccagcctaatgtgcatttggctggaatatggttgtctcagaataacatcatgcactcgggcttttatacttctgcctttaggggactgtggcagcatggcatgggtcaagaagtacttctccttcatcttcctttgatgtcggtaactcatcctttctgcactgcgggagttgttaatgcttttgtgtcctccagttcacatgctgattgctaagaagaaaatgagcatgagtgaacccaaagctgctgaaacattctgcgtttatgcaacttccttgccctctatacaaggaagatggtttcattgtcttgtctagagaataaagtcttttttaaaaataaaatcggtgtatccctgaccaagcgtccattaacactttgacaattgctcaaactgcatggtcacagcagcctcagctcataccagccatccaatgcaaggaaggacaacaccaagcccagaggacagttcctggactgatttcttcaacccaatctcacaccccatgggacgaggtcatcaagcaggaagaaggatgggtaatagcctctgagatttttatatattatgttttttgaaatccactgagtgactgctgactatttttctagaaatatgcccttggttttagaccaaactactttcctgaaggacctgaggttcttcaaaaattagttttcttggtaggagtgatactcatattcacctgaatatgaagttctgagctgaaagtaaggaatttagcaggagggttggcaaaagaaaaaacttattgtcaaaatatatctgtgtgaggcagtaagtaatagatatgaaatgaatgttgccaacaataaacgctaaagaaattctgagaacccctccctgcccaccacagcatcacagaaaggtgaattggacttggtttatgaaaaataaaaaaaccctggatagtcagagaaaggaagtgggtggtgggggttggtggggggggcagttttcctaagaaggagactcctgtaaggagaaacgtgaaggaagaaaagccaaggaatgaatatgtcagtgagtggatccatttttcacaagggaagatgtgtttgaatggctaggcaggggccattatgttgagtgactgaagtaccacaggcagacccagcacacatgagtttgcacatggcagctggagctctgaggacacccatgggggaaaaccaagccaggcaaagatcttcagaatcaatattaattctatgtactgatgaagagaaagagattccattaaattaatgaacatgtcaaggacaatacaattggcttcaactacacaatggtatgatgactcttgaaggactctacttataagagggaagatgaacaagagtctagagcccatcatcaagtgggactttttctgggagaatgtccatttgtggttttgattcaggttagcacttgctcttgtttgaaatctgggataacagggtcaccacatttttgtcctacaaagatctttaatattttagtgttgaatatttagtgttgaatcttgaatatttagtgttgaaaggctgcagtgcagacctgggtacccagtattctggtgcttcactgggactgattaaatctcccccagaggcagtgatgtggatagactttgactgaattgacagccagaaatatcgatggggtttatgaattgtttggcctctgtttcactcaagacttcttatttcagcagagtagatctgtgataactgttaaaaacaacatttacaagtatttcagtgaaatttctgcactactcaacattgtacatgttaaattttaaagaccgcttatacttgggtttttgggaagaataattcaatgacgtccactgcttcttatttcttgcccctgtatactttctgtaactccacctaggtggtcttggatgacgattctgtttatttgcatattcactttgtgaagaaaaaaagactaaaggggggaagagggctatttttaaaagtccctttggttggtaagggggaggggataaaatggtgcctgagccagcacactttgtcttttctccatgtgtcagattgcatgtttctataaaaaaggcaatgtttctgtctctctgcaagatttgggtgttccatcatgcactcatgtggagtccttccagactcagcaaaaacaaacacacagcatagctttcatataactcggcccttcaaggaaagccagttacttgttgtggtgctctttgatgaaacaataatctatctcagttcgggagatatagtcagtatgtgctttctttcctcttggccagatgtgaatatttaaaaaaatcagctgtagaccataagccaccttcaggtagtggtttgggaaatcaagcaataacactaatattgattccttcagatatggactccagtcatagtataacgcttcagcctactgcaaatccaaacacaggtttggtggaagatttggacaggacaggacctctttcaatgacaacgcgtaagaataacgatgctcagccactttattgacttgtattcctgcttcatctcttactcgctattggccaagatgcagagctttggtggtggaatggtgctatgtggcttacttcagcccagagtgtgaaactgtcttcattgtctgtatttcttgtggaggtctctcaacctgattttcccttcatttctttgtgccttccagatttaatgactttgtgttttaagaaaaagtaggactctattcaactccattttcattctctaagtagttatgtcagtgaaacacatgcccacttccaggatagtgatttctctatgttttaactgaccatttcctttcaatgtccatctttcctccagccagtgcagaagaggggtaggattgcttgcatggttgtaaaaagacatttttggggccagataatcctagagatcacatcagttctcagaggagaggcaaggcatgttattgacaatcaacaaaggtggcgggatccctggaacaacaacaacaacaaaacattgctagtatctctttctatcactaagaaatgttcaaattctagtagccttaatttctactctatgtgcagggatgtcctagagatcagcctaaagtcgttcataatttctttgaggaatacaaaagaaatctagaattaagaaggtcccattttactgcttgccacacataatgggcagagtccttcatatgagccctttaggcaaaggaaaaaaatcagcaagcatgtattgatggtcagcaatgtaaatagcacagcgttaagcatcaaaggagatgcaaataagcctatgaatggtccttgccaaagaaggacttatatttccgttttatgtcactgttggcttttgttctgacattgggtttgggatttagtgactgtctttctcctggttgtaatatttattcggtggtgggcatggcttatgggtgtgctttatgaagtttttgcacctgcaactcaggtcagtacctttcttaaaagaacacaaaagaaataaacttgaaacagtccaagtgattttagatatgggcaatgggtcaacctccagttgatatatgtcactgagggccctgtgtttgcccaggcaagcgtttccttggtgcagtgatgaaaatcccaatgcacaggtgaaattaagaaataacttaataatggagtaaaatggtaactttaatttaatgacctttacaaggtagctaagtatttccttgtataaatttgatctgtgttacttgagtaggctattctagataggcttctttttcttttgtggttacaactagactacaggctatcatagtgttcattttccctgccgtcacatttcttgacacacagttaggtgcttttggttactgataggagcattgggattcaaatattcttttttccatgtctctgtgttctctggttttctggagtgactgggagcaatgctgcaattgagcctggacaatccaggataggcaaagttttggctcagtcttcaccttgccactttacctttgatgattatactgagaaataaagggtcttcagaaccaaataggggcaaaatagaattcttctgtatatttctatcaatcagaggagaattgtgtgcacaaaccttggtcttcctatgcacctatccatctgactctactctagctagattttccttgctagcagataacaggatttgtaccgtagcttcaaattaacactggattcattcctcattgaaacagagcagagtaattctcagagcttctctacatcacatgaaggcttggaagaagataaagaccatccaacaacttctactctgacatcaagcagtaaggattataaaacctagttggcttcagctattgataagaatcaatcaattatgggtacttttgcagtgtctttggtggaggtgcatccattagctgccgttacactgttacttttaatcaaaaggtgcgtctggtggtggttctctgatttttctgttttatatacctcttcgtacattaagtgcaaactacatttcttcatcttaaaagttgggtttctttcactctagagttagtgatttgttttaacaataatggattgcttatatatgatttattttatttatttatttttgttaacttgagatctttctaacttttttatgtgggcgtttaaatttagtgctataaatttccctcttactactgccttagctgtgtcccagagattctgatatgttgtatctttgttcttattagtttcaaagaacttcttgatttctgcattaatttcattatttacccagaagtcattcaggagcaggttatttaatttccatgtaattgtatggttttgagtgagtttcttagtcttgatttcaaatttgattgcgctgtggtccaatagactgtttgctatgatttcagttcttttgcagtgtgatttataattggcgtaaatgtctgattatatcactttacattcctcacaataatattgttttgccttttgtcctctggacctccatggtgctgatgactaaaaagcagtcccttctggaaaagaaaagaataattaaattagtagcctcaggcctttgaaaccatgcatttgctattttaattgcaggcagcaaaattttatctttcaatccaatgatatgtttcctccactacatcaaagatgaatccaattgagaaagaactcaagattatctagtacctcagctgacttcaagatcacagttgtagtgacatagccttacctaataacccaagcagatgttgcaacaaatgccaattctgggtattaagatcaccaaaatctcttctgttgagtgatgtccaagtagtgtctattgcaaaatatttattctgttcaatagtatgacaaacttcactctatttctccctatttatggataacaagtggaaagcttttgcagcaattgtgtgttctggagacaagcacatggtgggtggtgatcttacaaatacgggttcatcactgattccacctccacacagataggaatgatgtcacaggtggaagaagagacccaaatcattctgaaggctcaactactttactggaaggttatacctctcattacccacacacgaaggaaagcaggaccttcatcccagtgacctcagctaagactgggtcctttggagttactgcagttactgttggagattccaactctaatgtcaatcgttccttatcaggtaatttggcatttattatctagtttgctttctctatatagagaaacaatatatagtttcatattacagaggacattttctgtgtagtctgggattggactagtttgtgatatggaaatatctttcattattggttatcaattctagtgcaaataaacttgggtatattttagataaaagaatgcttccttttgccagtgttttttccatttgtctgtgtttgcatgtgtgtgtgtgtgtgtgtgtgtgtgtgtgttgtgtgtacaagttggctgttatgatggaattgctttctttgtcttatcttgtgatatatgaagttgaaccacatgaaactgatatttttgcaggtgaaagtagtcgaattttagcaattccgtttaattcgactaatatactctacttattttgtaaggttttatcctacaggtgaataatttctatatactagtatctttgctctgaaattattatcttgttttggtaatagattgatcagttttacttttggtgatggataaacctcttctagttctgatgcacacttaaaatgttcatgatttaatctagtattaatgaatagggaccacttctcttattgtaatagtgaagagaggaacgaagataatttattcaatgaagtttgacacggacctagaataagtctttttttttctcaaataagtagtcatctctgcttctgcttttctttgcttctccatttgtattaagaaattaacagtgaagaaaggggaaatggaaaacgcccactgtagtgaagaaataaaaaacagattctgtcttcctagtactagtttttcaattgctttgtaacacaatcactaggcatattcaagattagagactttagatacataattttggagcagagatcttctctcctccccccaaaaaagaaaaagaagaattcatatgtgtgcatatatatataatttttttttttgagacggagtttcactcttgttgcccaggctggagtccaatggtgcgatcttggctcacctcaacctccgcctcctgagttcaagcaattctcctgcctcagcctccatgagaatccaatatgtaaaacagatgacggttgtgatgcagggacagaaaattcagaatgccacatgcttggcctcatttctctgggtggcctacccaagagcttcaagaaaaacagtttaagaaaatgctaacttcagcaatattggcaagacaaagccccttacactccttagttctttattcagcattgttctgctctcatttattaaaaattccaagtaccattgtcagtattcttcagaaaatcttatagtgctgtctcatttctcttggcaaaagaaagcctgttgtgcaacccaatgaatttaattttttttttttaaagagtcttgccctgtcacccacactgtagtacagtggcgcgatctcggctcactgcaacctctgcctcccgggttcaagcgattctcttgcctcagcctcctgagtagctgggattacagatgtgtgccaccacgcccggctaatttttttatttttagtagaaatggggtttcaccatgttggccaggctggtctcgaactcctgacctcaagtgatccaccagcctcagcctcccaaagtgctaggattacagacgtgagccaccacgcccagccatgaatttaaagtttaaatggcaattttaatagtcacagtaccctagaatgcttatagcctaatgttagtaaatcaaatgctttttacaagactgatattcacagacactgattctttctgatttccacagtggtacggacagattttccataattctccatggattagacaattaagtcacccaattctcatccttggttttcttcaaaaacactcacccacataaatctcatttatgtctatacatttttctcagtctttacgcttaatgttaagaactaaagcatttgttgaagcaagcggatcacttgaggtcaggagtctgagaccagcctggccaacatggcgaaacctcgtctctactaaaaatacaaaatattagccaggcatggtggcaggtgcctgtagtctcacctactcaggagactaaggcatgaaaatcacttgaacccaggaattggaggttgcagtgagccgagatcgtgccactgcactccagcctgggcgacagaacgaggctccgtcccccaaaaaagaactgaagcatttagaatcatagtggcagtggtggtggtggtgatggtgatggtgatggtgataatgatggtgatgggatggtgacggtcatggtgattttggtagtgggagtattggtgtggcatttcagcaaatgttgttttcatttgttttaaccatcagccaaggaacaaagcaatctgtctcttcaatatagttacacaggtgactaagtgtcacccgcttccaccttctctaatcaaggaaatggtgacgatcaggttactatagattccttataaggtgccttcataatggataactgtagccattttatgtaagcattgtcctgtgattaaaaaaaaaaaaagattccagtatgcttttgaaaaatgtgggtgggggagagagttttaatatgctgcattcaagatttgacctatggatttagattctagcaattcatgaggttgtcttaatctaaagctttctggtgatagatgtttgagaagctaggattatattaactagtcatgttgaaactacagatttaactttaaaaaattattttaaacttactataatacccatattccaatacacattattaatgttagctatcatctcaccatttccttttttacttattttcaattttttttgaaaataagtagttgacctttctctttgaatctttacatcattcaatcccaagattccttattgcatactaatttcctgccgccaagaaatctctgtttcatgccctaagccagagtatgcccatttgcagtgattatgtttctcataatccaattcatattgtccttatttaaaatgtacaatgtctagtctcaacctcatacctgcaaagatatcacaatatttttgttagcatgttccttaccacagttcttggatttctaccaaaacaaagtttctacaaaacttcctgtggtcatccttcttagcctttgctgccccagtttccttaattcttattaaagttctagctcatttatcagtggattaagcaatgaacggtaattaacattgtggacccattcaaggctgttttgccatcattttttggaataccttaaaaagactaaactttgtgataggctgtataagaatgcaaaggtaaagaaatgcagatgggagtgtaagtgaaaacatgcagtactgaccttcctgattgctcattacaggagaccaagacacattccaccccagtggggggtcccataccactcatggatctgaatcagatggtgagttcaaaactgctttagtcatttactgttataatcattgagcctaatgatgactaccaacgaagtatgagtcagtgtctccagagaagtggttctcaaaccttcttagcatacatcacaattgcagggagggcttattaaaccacaatgctggaccccacccttaaggttcctgattcagtaggtctggggtggagcccaagcatttgcatttctaatcagttccctggtaatactgacactgctgggacagggattgcactttgagagctactgctctggaggaaagccttgcatctgaaagcctcaggaagaattcaagcagtgtcccaatttaaccttgcactacaccagagtgattaagagcttgagctttgtagcaaaaatggcctgagttcgattccagccctccgcatattaactgagcaagatgctttaaagggtctgagacaacatttctcaactaataaacttggaataataacaattgtcacaggacattgtttcaaagactaaatgatagaatacatgtaaagcatttagcataatcctggcacatgatatcatcactggtatttgttgggaatttactgtgtgccagcagcatctttctaaacactttacatgtattaggttgggccaaatggaactgccattattgtaggtcaagaacaggtcaatatcggccaggcacggtggctcacacctgtaatcccagcactttaggaggccgaggcaggtggatcacgaggtcaggagttcgagaccagcctggccaaccctgtctctactaaaaatacaaaaattagccgggcgtggtcctgcgcacctgtaatcccagctactcaggaggctgaggcaggagaattgctcggacctggcaggcagagtttgcagtgagccaagattgcaccactgcactccagcctgggtgacagagcaagactctgtctcaaaaaaaaccaaaaaacaaaaaacaaaaaaacaggttaatatcagcaaattcatagagtttatctagtatgaactcattcagtcatcctataaactctgtgacataggtaagtactattattatccccatgttacagatgaggaaactaaggctcagagaaggtaagtaacttggcagagttgacaggaccagagagtgatggagccacctttcaagcctggagggccttgtattacttctcatagcacagtctggagaaggcattccataatgaccataattactcccaggcatgaattcttaaatagactcctgtttgttgtgattcagatcacacccctacaaaccttaccccagactgcaaaagtctgacatgaggtaggtttactaattacttctactgctgggctactgggaggttctgccagtgctgccttactgtggtctccctgaacatcataaatccaggtgaccccatgtaaatgatttaagccatatcaattattgtctcccctttttatgcccaagtttgagtgaggctcaccatcagatttaaatgtttacacattgaaaacaaatatgaagatggatatttacatggtggcttccacaataactctctatggaggagcactaggaggtagggattcattagaaatgcttctgaaatagagacagaagtcacaggttcactggggactttaggcagggcacttaacctttcccagactcagtttccttgttagtaaaaaggagatcaaatcatctgcctcagttgcttcctagagttattgtgaggaagacagggtaccagaagtgtgaaagtactctgaaaaagtagggagttattattaaggggcatgatctctaaaaccaagagaccccagccactctctaagtatgattctttaaccatcagagtggacatcacctaggaacttgttggaaatgcagaatccttggccaacccagacctactgaatcaggatctgcattttaactacactctcccacccaggtggtttatatgcacattaaaatttggaagcttagactgtgctagactgcttttctcaccattgaagccaattgaacaatctctgtgcatatgtctcagattacatgtcatctcccaacaggaatatcaagtgctcctctttgtggaacttgctactgtggccagtcctaccctggctggatttgtagacatctagggcacaaggcaagacctgctatctcacatccatcttctgtggcttttgcttgaagtgagaatcaagcagacaggagccagtctcttttgtttggcttctgagcaggtgtctattgttcaaacaggaggtttcatcttgctgcacgcacacccagatcttttcttgctgggagcacttcttctttttttttttttttaaatcaaaataaagtgattatgatccgttaatggcctctttttaaatatcaaaggcttctatgagtcagaaaagaaaaaaaaaaaaaagaacagtgagagtgactgtacctcctggggagttttcacggccaaagatcttcagtttaggtggccagtgtcccatgagttgggcaggtgaaaacctgccaaccaccaaggacactggaaggcatgtagggaaagggccttggactgttttggagatttgtaaagtcaaaggccactgtcaacataggataggggatgttgaaacacccagatgtctggtaggaactggttttgctcccttttaagttttaacaaaagcatcaaattgcataaacaagagccatcctgtccccatataaccattgtaatcaagatttcagtgtgcacagcctaaagtttggctccatgaggaaagctctcatttaagaccccaccattttcatccattgatcagccttcaggattctacagtgggcttccatttggtaggaaaaaaaaagttcattttggtggaacactttcaaattttgttttgaagcaatggaggaagaatttttaaaaattcatgaagctttcattttgatgaggctcttcacaagatgtcttagaagtttcttttttaaaaaaattgtttatttatttattatttttatttttaacagggacaggatctccctatgtttcccaggctggtctcaaagtcctggactcaagagatcctcctgtctcagcctcccaaagtgctgggattacaggtgtgagccaccatgcccggcttcttagaagtttcttttagaaccattgtgtctccctcatttcgataggcctccagttctgacttgaggattgtctgtcttgcgatacttcctcccagtttaaggcattttgttcatctccttattttgctttttagcagtagaaaatgttgattcttctaacaaggtgtgtttcagtaatatattagcagggactctaatagggtgatttttcatagtcagaaagggccactgccgctaaactccttatttatttattgtgaggtggagtctcgctctgttgccaagctgtaatgcagaggcacaatctcagctcactgcaacctctgcttcctgggttcaagcaattctcctgcctcagcctcccgagtagctgggactacaggcacatgccactatgcctggctaatttttgtatttttagtagagacggggtttcaccatgttgactaggttgatctcaatctcttgaccttgtgatccgcctgcttcagcctcccaaagtactgggattacaggcgtgagcaaactccttattttatagtgtttatgttggctcctatgatgctattggatgagattttcaggttccctttgggctttctggagcgtgtgagtcccctgggggtcttgttaaaatgaagattctgatttggtagctttgagatgaggcataagattctgcatttctagcgatctccccaggtatgcctgtcctgatggtctgagagccacactttgagtagcaaggtcctaaattaaaaatagaaaataacaaccacacacaactaccaataccgtgtatttcttcaaatctctgcaaaattatgatgaacagcattctgttatccccatcttacgagtgtgaaaagggagacttggagaaggtagattgacccagcacacatggctagttagcaagggacagcggtgagacttaaatccagggttgtccagctctagacaccaaagtcctgaacactgtgcaacactgctgctgagaattctcatgttccttgacacaaaataacattactaagccttagccttaatcaaatgaggtgggggggaaatcttttgtgtaatgctttataaacatctgcagcttgaatccataaatggcttctcagtgattcagaatgtggagagctgccctttatgcagctccacaaggaactcatggttacacatttcaaactttggttgagagatgttgtttttccccttaggacactcacatgggagtcaagaaggtggagcaaacacaacctctggtcctataaggacaccccaaattccaggtgagtttcaaactttgaggcagaaaaacacactgaaagcagctttctcagaatgtcccagcaaggacgaagagactcatttgaaagcacattctccacaatgcccaacatatgaatccaattgctcctctttacaagttaaaggatgaatgagaatactacaccctcttggtaggaaaagatggaatagtcttttcttcctgggttctgcaaactagctgagctcatactcagatctgtccctggcctgtcccagagaagtgccatgttagttactaaagcttccttcctaaatgaatgatcaccaagaggaccccatgtcatacctaggtcctttctatcccaatccaatttccacttatttctggggtccaaggtgaagcatgtaattttccttttacgattacagacagggaggagctacaagaggcatttatgttagatggagtgaaaactttcttttggttccccaactaatttttttttggtcgagggaccgcctgctgatgtggacagaataaacttttcagaaagtatgcatgtgcagtgaggaggctgggacacctggttctcctgagcatcaagacaaggcatttgttgcaaattctttatttgacttggaattaaaattgatttgtcatagagaattactaaagggaagggttctcctaaggttgtaaattacccttttaattctctcctcttcagaggtctccagactgagcctctcttggggaaagagaagaatgtggcatgcaccgttctcctttgccccagcttgcctaagcacacctgaagacagaccagacagagacaggggtgggctgtcccaagggagagcacaggggaagccttagctgtcatcaggcagcaagattcttcccagctccagtgacagtgcaggtgggatatctcagggctggaaaccagggccacagtgggcaggagtagaaaggaagaacagaaatcgggccctcctgtcagtctcccccacttctgactctacctccctctccaaactcatctaaaccaggaaaaggtgaggcaaaggtagtgctgagcaggaaatcagagataaaccaaaatttccaagaagaaaacagataatgagactttccatgcctcttctttctcaagccctggttcattgcacacatatacaacccactttgcaactgaatttagtggagttgtcaagtcatattttagtcctaaaagagcctgatttcaaaatgtgtagaatattaatccacaagtgatatataattattgaaaacatttgaaaaaatacaactaaataaaataatggaaatataaatcaattattatcaatctcaccatccagaaataccatggttaccattttaatatacgtctttttttttttttttttttttgagatggagttttgctttgttgcccaggctggagtgcagtggcgcgacctcggcccactgcaacctctgcttcctgagttcaagcgattctcctgcctcagcctcctgagtagctgagattacagcatgccaccatgcccagctaatttttgtagttttagagatggggtttcaccatgttggtcaggctggtctcaaactcctgacctcgtgattcacccacttcagcctcctaaagtgctgggattacaggcgtgagccaccgcacccggcctttcctgtcattttaaaatgtaaaatatataccaaaatgtgattacaccttacacggtgtttagcaaacattgcctactggttaaccatggcttccatgtcattgaatatttcctcctcatattgtagtgcgtaatgcaatagatgtaccctaatttatttaaccaatcctttattgcctccatttttgttttttaatacaatgtaaggtggataggtggatgctcttatacaggaaaaaaatgttcctttcaaaagaagcctacatttccttttatatgtttaataatattataccaaaggcatctacaagattcaacaagtcatcctgtccttttttagaaacatagttctcctgaagggacttgaaaatcctgactgatgataaaagattaaagcaagaaggctgttggacaaataccttcagcaaattgctcttccagaattacctgcctattggctggacctattggccagacccccctgcagcgctgactgtggtgcttgtttcaactaggtcaattataaagtgcatttttgtttttacaaagtgtgtctctgaagctcacgcatgtcatttaatttactcataccagaatggctgatcatcttggcatccctcttggccttggctttgattcttgcagtttgcattgcagtcaacagtcgaagaaggtaaggggctgtcctgggggctttcaacttggaaagggcatcatttaaacctgggctttatatccttgctgctcagagcgtagtccctggaaccagcagcctgggtaccctgggagtttgttggaaatgcacaatctcagacccaaccccagacctcctatggcagagtctgcatcttaacaagtttccagggattcatgtgcatggtgcagcttaagacatctttctctgccccggtttttagagacaggagacacctgtgattgtttggctcatcacttttaggtagtggttgaatcctttgtgattttacatgttttttagggttaaacctcatgcagactctgtctgatgaaagttatgaagtatctcaccaggaaggcacacaaaagtatatactcattcattgatttgttaaatatttattaaatacattcacaatgcacaaatatcgtataaagattcagtgattcatcatcccctgtagcctctctgaggcccagggaacctttaagaacttttaccagaaggaagtattggccttgtgcttttgtttgtcgtttgtttttttattggccttgtgcttttgtttgttgtttggtttttgtaatgatatcattttctattttctgggaactgtagttgaagagattcaggttatagcataagaagagcactgtttcatcgtcttcttgctgttaggaggtctatgaagcagagaagaactttcctttggaaaacaactaaatgaagacagtcacctcgctagaactgacacatgggctgtttttatattcttgaaggccactctctccctacctgaaccaagacctataggtttacatgttatttacattttatatataatatatatatatatatatacacatacattatatatacacaatagtaattctagcaacagaggaaatgacctttaacaggggtataaatctaaatttataaaagtataaatctaaatttcttacccaagacactttaaagatacattatttttctccaggacgtaattcataggaatattaagccttttgtaaatgtccctttagatggtttctcataaggtaaaagaaacttatttccaagcaggaccacctttattgtgtccccagatcacctcacagggcagaaaaatgcccctcagtctgggagaagacctagagagaattatggactccttactggtttttggaaagcaaccaacagctaattccaacaccatgggcagcccatacagtctctaattatctgagaaaatcaaatgatgctgttacaataattacgctggtacaagttaataaaagtgccatgttacagtcaaacagctatgttgctatctataccattgagggcatagttttaaaaagtagttatgctacctgattgtataaggaacaaaactgagagaaaaaatctaaaaggccgcctatgattgaatggaaagattttttttagttgaatttaaataatgtgacttgggggagcctttacaaagagtctttatacctcccttcagcttcctcattttcccttggattacttttgctcaattaaatatgaatttcctattgtgtgcaatcagccctttattgccaagccctagaatgcaccacttttgctcacatacacagtccataagctttgcacatgtcaccatagaaacgctggcatggatgctgtcgacatttagggagacctcggagaagcatctcagctgtccctaagagcagctggagtccatacattggggctgggtatctcccccatcgtctgtgtcttgtcagcagcagacagcagagaaggggcctcattgctgccctctccctcctcccaagaccagcagtcaccctggcaaccggcaaacagggacacacagggtccggcacagcgagtatctcaccaggaaagtagctgcttggatgccataaattactatgtcctgatttgataattgaaaacagatttgccacgcagctaaaaggtggtgaacagctgtacgggccccttaatgggctctgtgattctaaagctgtcaacccatttctaatccccttcaaaggctgaggcttttctgctttgagtgtcacatttaagagaaagagatacagaatcctattttcatcagagaaagtttggttgaaaatggggcctccaataggtgttcatttattcagcaaacatcttttgagtggctcctgtgactaccagccctggcaaggagaaagagaaggtaaaaaacaaaaagagtaccaccccttttctaaaagaatcttgaggtttagtggcagtattggcctcttgaatttgaattggctaatatttattgagaacattccctgtgccagacactgttatataaattatggttaaaagacaaaagtggaaaatcattagtctctgaagttgacatacaaggatgggtcatgggcttgcatgatgaagtgatctgtgagtcacgttgtcttaaagatgctgggttgggggttctattacttctttaggtttttccacccctgccatcatccaaaacagctttctttgctgttcctcatgtcacctgactccttgagttacagctctccaagagaaatcatattttattcccttttcatgagagcacataattattttaggagtcagttgggttgatagatactgcgtgaggctccagagaagattttcctttaaagaatctatctgggccaggtgcagtggctcactccatgtgcagtggctcactttgggaggccgaggcagtggattagttgagcctaggagttcaagaccagcctgggcaacatggcgaaaccccatctctacaaaaaacacaaaaattagccgggcatagtggcgcatgcctgtggtctcagctgctcgggaggttgaggtagaagaatcgcttgagccccgggaggtggaggcagcagtgagccatgatagtgccactacagcctgggcaacagagtgagaccctgtctcaaacaaacaagcaaacaaacaaacaaacaaaaacctatcttatttgtctaaagaggagaaaaaaacatgagaactttactatgttgcttgtacataaaagctgttcatcagccttcactttaatgggaataatcgtcttttctataaaccccagcaggcagtcacccacactccaatcagtaggtcttctctacgcatcgccataatttagaaatattttccttctcttatgctacagtctagctcctgcaatctgagctcacccaacctcgtcctgctgtctagaacagtgctatgcaatagaactttctgtgatgatggaaatattctatacctccactgtccaatatataactactagccacaactgagcacttgaactatggctagttcaactgaggaagtgaatttttaatttcatttcattgtaattagtttaaattcaaatagccaaatgtggctggtggctaccatattggatggcacagctctaaaacagtgcaaaataaatccctaaatatcgttaaggattgtcaggtagaagagtcatgagatcagttgccaagttacccacctaaatcttttaagataaattctgccatgccataaaagtatgttacctggcttctaaaccccagccagcctgccctctctttcctggtgaggtctcagtctgcctccttccacactgtgtgattgctgtgtgctcagctaatgcctgagatttaagggaagaggagataaaggtaagacacagatccatgaggatctctgatcttcagagtcagaagatccaagctgtggctgggcgcgggggctcacacctgtaatcccagcactttgggaggctgaggcaggcagatcatttgaggtcaggagtttgagaccagcgtggccaacatggagaaaccctacctctactaaaaacacaaaaattagccaggtgtggtggcgggtgcctgtaatcccagctacttgggtggctgaggcaggagaatttcttgaacccaggaggcagaggttgcagtgagccgagatagtgccattgcaccccagcctggttgatgaagtgagactttgtaaaaaacaaaacaaaacaaacaaacaaacaaacaaacaaaaacagaaaatccaagctgtgattcttgcagtgcagtgccataacaagctgtgaaactttggacaatacttcttggacttggtgtccagtttacataatgaagaagctgggctagatgatctctgaagccccttaaggtctagtgctccttcttaaattcttataactaggaataacttaaaaattagaatttgtctcttaaaagcacttattagacgcctagagcactgaatattggaatgagttatttatgagaatcatcctaccctcctgaaactactcagacagatagaaacacataaatccaaagggaaatgcaggccaaccaaaaaccaagcacaatattcctgtgtcctataggtcaaatgttatccactgtcaagatcagcttcgtttagattaacaacattaatccccacccactcccatgcacagacatattttttatgctcataaatcactttcccacaatatttcattccatccctcaaccacccattggttagggaaatgggaattactttaactagacaactttcctccaaagaacacaggggccagggaattggaagtaacacaagcagtattctaccttgagccttttaaatcctcttcatagtaaataataacgaggtaggtggaggcagccaggagaaacaagcaaaattcatttcatatggcttttgttatattaacaattatagatagcacttgaaagcttactgtgctccagatactgttctaagtgttaacccaaaccttagtttccttaccccgcataagagcaagaataacaattatttccttacccctcataagagcaagaataataacaatagactcatttatttagtgacagtctctgtttcaagggcttttcacaatcctatgatattgctactcttagtaacctggtattattgatgcaaaactgaggctcagagaggttaagtgagttgccccaggtcacatagcagtaagttctcaaaaccaggccttccgagccccttttcttctttcttttttccttttttttttttttttttttttgagacggagtcttactgtgtcacccaggctggagtgcggtgatgcaatctcagcttactgcaacctccacctcccaggttcaagcaattctcctgcttcagtctcctgagtagttgggattcagccacgcaccaccatgcccccatgaccggctaatttttgtatttttggtagagatggggtttcaccatgttggccagctggtctcgaactcctgacctcaagtgatccttctgcctcagcctcccaagtgttgggattacaggcatgagccattgtgcctggtctctttttcttttttgaaacagggtctcactctgtcacccaggctggaatgcagtggcacaaacacagctcactgcagcctcgacttcctgggctcaagtaattctcccacctcagcccccaaagtaactaagactacaggcacatgccaccacagccggcttatctttgtattttgaatacagactgggttttaccatgttgcccaggctggtcacaatctcctgggctcaagtgatccacccgccttggcctcccaaagtgctgggattacaggagtgaaccactgcacctggcctccaaggcccttttcttgaccatgcatcctgctggactccatctgtattcctggtccccatgaatctgtttcacagttcaagcatccttcccccaacccctcatcaagccttatgctagaggagacaggatctacctcctgttgaggaggtataatttttatttccccaaacaagagcttaaagtttatggccttggcagtcctacagggaatggtccatgatcatgaataatagaggctttgtcactattactccaaatatccagaggcaaagtgaacaattctgacttcatactgtttccaaatctccagagggctggcagcattgacagagccaggcagagcccaggctttggtcataaaggcctggatttgaatattggctctgtcattcttactttctgtgtgacctcgagcaagttattaaacctcttttggcctcagtttccattgctgtattatgggaacaatagctgctttgaaagagtgttgtaagaattacagaaaattacatgtaaaatgtctggtattcaggaggtaatctgcttccctgaatccccatcttgcttgtagttgtgaagctatgcaactttccttcctctaagcatagtctgactcgtatatgtgtagtagtgatatgttacaggaaagaggaagcattgcattaggctgggtggggtgaagcaatggacagtaaccagggaaaagatcaaggtcgtactcttccatagcaactttcttttgcgtttgggtcttaagtaatgtttgagaaaccttaaattaacgagaataatttgtcttatgttattaaacttcctatatcagggttgtatgagttagccaatgttaggaaaacatcactatggccttatacctctagaaaaatgttgttttattcttctcgatacattcagtaataatgctgacaaggccgacaaagtgttgactgggagaggaagttatgggactttctggaatatacaaatcagaatgatttacaatcatcatgttgatggtttatctaaatctgcagaaactgctaaaatgcttaaaagaggcaaacatttccattgtgaagtaagatagaaagagaatcagaacttgagagtcagacagaccagggtttgaatcctctttcttacttgctgagttacttgggggaagttactgaattttctgatccccaaggtttcttcacttggaatatagagaatataataataacaccggcttcctggagtcttagttgctggtttgcaaacttgactgtgcagagaagcccctgaggggttgcaaatttgactgtgcagagaagccacagatcctgggctccaactctagagttttctgattcagcaggtttggggtggggctgagaatttgtatttctaacaggttccaagatgatgcttttgctgctggtccagggacctcactttgaggagtgctggttgttatgagtctggttgttaagtgctggttgttagttgttaaagtagagaaaacccctagcacagtgcttggcacacactaaagccatcataaaccatagtgatcatcaatgatggtgctcagtaaggatgatgatctgatgcctgagtcactgcaatctttctgatatggtacattttttaaattattaggtgtgggcagaagaaaaagctagtgatcaacagtggcaatggagctgtggaggacagaaagccaagtggactcaacggagaggccagcaagtctcaggaaatggtgcatttggtgaacaaggagtcgtcagaaactccagaccagtttatgacagctgatgagacaaggaacctgcagaatgtggacatgaagattggggtgtaacacctacaccattatcttggaaagaaacaaccgttggaaacataaccattacagggagctgggacacttaacagatgcaatgtgctactgattgtttcattgcgaatcttttttagcataaaattttctactctttttgttttttgtgttttgttctttaaagtcaggtccaatttgtaaaaacagcattgctttctgaaattagggcccaattaataatcagcaagaatttgatcgttccagttcccacttggaggcctttcatccctcgggtgtgctatggatggcttctaacaaaaactacacatatgtattcctgatcgccaacctttcccccaccagctaaggacatttcccagggttaatagggcctggtccctgggaggaaatttgaatgggtccattttgcccttccatagcctaatccctgggcattgctttccactgaggttgggggttggggtgtactagttacacatcttcaacagaccccctctagaaatttttcagatgcttctgggagacacccaaagggtgaagctatttatctgtagtaaactatttatctgtgtttttgaaatattaaaccctggatcagtcctttgatcagtataattttttaaagttactttgtcagaggcacaaaagggtttaaactgattcataataaatatctgtacttcttcgatcttcaccttttgtgctgtgattcttcagtttctaaaccagcactgtctgggtccctacaatgtatcaggaagagctgagaatggtaaggagactcttctaagtcttcatctcagagaccctgagttcccactcagacccactcagccaaatctcatggaagaccaaggagggcagcactgtttttgttttttgttttttgttttttttttttgacactgtccaaaggttttccatcctgtcctggaatcagagttggaagctgaggagcttcagcctcttttatggtttaatggccacctgttctctcctgtgaaaggctttgcaaagtcacattaagtttgcatgacctgttatccctggggccctatttcatagaggctggccctattagtgatttccaaaaacaatatggaagtgccttttgatgtcttacaataagagaagaagccaatggaaatgaaagagattggcaaaggggaaggatgatgccatgtagatcctgtttgacatttttatggctgtatttgtaaacttaaacacaccagtgtctgttcttgatgcagttgctatttaggatgagttaagtgcctggggagtccctcaaaaggttaaagggattcccatcattggaatcttatcaccagataggcaagtttatgaccaaacaagagagtactggctttatcctctaacctcatattttctcccacttggcaagtcctttgtggcatttattcatcagtcagggtgtccgattggtcctagaacttccaaaggctgcttgtcatagaagccattgcatctataaagcaacggctcctgttaaatggtatctcctttctgaggctcctactaaaagtcatttgttacctaaacttatgtgcttaacaggcaatgcttctcagaccacaaagcagaaagaagaagaaaagctcctgactaaatcagggctgggcttagacagagttgatctgtagaatatctttaaaggagagatgtcaactttctgcactattcccagcctctgctcctccctgtctaccctctcccctccctctctccctccacttcaccccacaatcttgaaaaacttcctttctcttctgtgaacatcattggccagatccattttcagtggtctggatttctttttattttcttttcaacttgaaagaaactggacattaggccactatgtgttgttactgccactagtgttcaagtgcctcttgttttcccagagatttcctgggtctgccagaggcccagacaggctcactcaagctctttaactgaaaagcaacaagccactccaggacaaggttcaaaatggttacaacagcctctacctgtcgccccagggagaaaggggtagtgatacaagtctcatagccagagatggttttccactccttctagatattcccaaaaagaggctgagacaggaggttattttcaattttattttggaattaaatacttttttccctttattactgttgtagtccctcacttggatatacctctgttttcacgatagaaataagggaggtctagagcttctattccttggccattgtcaacggagagctggccaagtcttcacaaacccttgcaacattgcctgaagtttatggaataagatgtattctcactcccttgatctcaagggcgtaactctggaagcacagcttgactacacgtcatttttaccaatgattttcaggtgacctgggctaagtcatttaaactgggtctttataaaagtaaaaggccaacatttaattattttgcaaagcaacctaagagctaaagatgtaatttttcttgcaattgtaaatcttttgtgtctcctgaagacttcccttaaaattagctctgagtgaaaaatcaaaagagacaaaagacatcttcgaatccatatttcaagcctggtagaattggcttttctagcagaacctttccaaaagttttatattgagattcataacaacaccaagaattgattttgtagccaacattcattcaatactgttatatcagaggagtaggagagaggaaacatttgacttatctggaaaagcaaaatgtacttaagaataagaataacatggtccattcacctttatgttatagatatgtctttgtgtaaatcatttgttttgagttttcaaagaatagcccattgttcattcttgtgctgtacaatgaccactgttattgttactttgacttttcagagcacacccttcctctggtttttgtatatttattgatggatcaataataatgaggaaagcatgatatgtatattgctgagttgaaagcacttattggaaaatattaaaaggctaacattaaaagactaaaggaaacaga

SEQ ID NO: 29 - DNA, 15775 bp, Homo sapiens
  DNA (1)..(15775): Caveolin 1
caagcttagcctggccgggaaacgggaggcgtggaggccgggagcagcccccggggtcatcgccctgccaccgccgcccgattgctttagcttggaaattccggagctgaagcggccagcgagggaggatgaccctctcggcccgggcaccctgtcagtccggaaataactgcagcatttgttccggaggggaaggcgcgaggtttccgggaaagcagcaccgccccttggcccccaggtggctagcgctataaaggatcacgcgccccagtcgacgctgagctcctctgctactcagagttgcaacctcagcctcgctatggctcccagcagcccccggcccgcgctgcccgcactcctggtcctgctcggggctctgttcccaggtgagtcggggtggggattgccgtcgggccagttctccgaagccccgggaggaccggctcccgggtcaggtcatgcatgcttaggtagctgtttatgggaaggaggggctagagacagcgattgaaaggcaacagccagtaggttcgaatccagaccctgcatacctccacgtgtggccttgggctatagattgcagctttaaaaaagggtagggggttggagatggaggggaggggcgggcctcgttttgttgcccaggccggtcttgaactccgggggtctagccttacctcctgcctcagcctcccgagtagctgggatgagaggtgtgaaccaccgccttgcttggctagattgcgtctcttacagtttctcagctgtaaaacgggaaacgttatagcggccacctggcagggtatcttggcccagcgcagcacctggccccaggactcgatcatgatggtttgggaacttggctctgtgccaacccaacaaggcttaagggacccccacccccctcaagatgtatattctgttcctcatcctctctgcccctggggaagtccagggctgcttctacttgggggaattccagagctgacttatccgtggcccaaagctgagaagtgggacgccccagcacaccctcccccagctccagcccagctagggaagagggaaggggtcagagggtctttcatggtggtgtaagtttggggaaccaggagggtgggagattgacagcttggttaacagctcaacaaagcctgagatccaggccagcacggtagttcatgccagtaatcccaacactttaggagccccaggcgggcgaatcacttaaggtcaggagtttgagaccagcctggccaacatggcaacatcccgtctctactaaaaatacaaaaattagctggcatggtggtgggcgcctgtgatcccagctgctcgggaggctgagggaggaaaatcccttaagcccacgaggctgaggttgcagtgaaccaagattgtgccactgcactccagcctgggagacatagcgagattctgtctcaaaaaacaaagcgttctgatccggactcagacccagatcgcactgctttctagctgagtaaccatttctctctatgaaatgggaatggtcccagaatctcccttggagaatgtatggagccagtgtcctcacacccccatccaagatagaacaaatctgagacaggaatctttgagtgaggcagtgctgggctcagacattttttcccaccttcggaggcagcagaatctgagggacctgatccaaataagccccttctttctttcttttcttttcttttttttttttttttttttttgagacggagtctcactctgtcgcccaggctggagtgcagtggcgtgatctcggctcactgcaacctctgcctcccaggttcaaacgattctcctgcctcagcctccctgagtagctgggactacaggcatgtgccatcacacccggctaatcactgtgttagccaggatggtctcgatttcctgacctcatgatctgcccaccctgcctcccaaagtgctgggattacatgcgtgagccacagtgcccaccccgtaagccccttctttcttacctgcaaggtagccagttgctacccatcctgtgctgagttacttgtattagcaagggatggggtggctatactcacccaccttacagatggggaaattgaggcccaaagagggggaaactacgtgtctcagggagtgaggagccagtctgattcctggagggctgactgtctccacctgacttcttaggagggaggagggcaccaacttcacattaaaatctggttggacacagtggctcacacctgtaatcctggcattttgggaggcttaggcgggaggatcacttgaggccaggagtttgagaccagccttagcaacatagtgagaccccatctctacaaaaatgtttttcagggccaggcgcggtggctcacacctataatcccagcactttgggaggctgaggcgggcggattacctgaggtcaggagtttgagaccagcctgaccaacatggagaaaccccgtctctactaaaagtacaaaattacccgggcgtggtggcgcatgcctgtaatcccagctactcgggaggctgaggcaggagaatcgcttgaacctgggaggcggaggttgcggtgaactgagatcgtgccattgcactccagcctgggcaacaagagctaaactccgtctcaaaaaaaaaaaaatgtttttcaaatattagccgggtatggtggtgtcctgtagtcccagctacttgggaggctgagatgggaggatcacttgagcccaggagttcaaggttacagtgagctatgattgtgccactgtattccagcctgggtaacagagggagacccgtttaaaaaaaaaaaagtgatggctaaagtccttccatggctccctattgccctcagtataaagaacacatgtggctgggcgtggtggttcacgcctgtaatcccagcactttgggaggctgaggcgggcggatcacttgaggccaggagtttgagagcaggctggccgacgtggcgaaaccccgtctctattaaaaatacaaaaattagctgggcgtggtggtgcttgcctgtaatcccagatactctggaggctgaggcaggagaatcacttgaacccgggaggcaaaggttgcagtgagctgagattgcgccactgcactccagtctgagtgacaaagcgagactccatctcaaaaaaaaaaaaaataaaagaacacatctttagcatggccttcagtgctcacgggatcttcctgaattaatctccccctcttcatccttgctcactcagctccagccaccctgccccgggacatctgtacttgcctggaacttatttcccttttctccggacagccagccctttctcgtcatttagatctctgctgaaacattaccctgtcaccaaagcactgtctattctatcaccctgttttgtttttgtcaaagctcatattaacatcagttattaattatcttgtttgctcataatttttttttttttttttttggagacagagtctcgttctgttgctcaggctggagtgcagtggcacaatcttggctcactgtaacctccacctcccaggttcaagtgattcttgtgcctcagcctcccaaatagctaggactacaggcacgtcccaccatgcccagctaatttttgtatttttagtggagacggggctttgtcatgttggccaggctgatctcaaattcctgacctcaagtgatctgcccgccttggcctcccaaagtgctgggattacaggcgtgagccaccacacccggcctgctcatgaattttctctttaacttccacatcgaaggcaaagtattgtcttgttaaggctgtgcctccagcacccagcacaggctgggcgcacattcccttgatgaacctgatttgtaatgcctgtcgcctcttccctcgtttcttctaggacctggcaatgcccagacatctgtgtccccctcaaaagtcatcctgccccggggaggctccgtgctggtgacatgcagcacctcctgtgaccagcccaagttgttgggcatagagaccccgttgcctaaaaaggagttgctcctgcctgggaacaaccggaaggtgtatgaactgagcaatgtgcaagaagatagccaaccaatgtgctattcaaactgccctgatgggcagtcaacagctaaaaccttcctcaccgtgtactgtgagtaactgagcccggagggctggactaggcagacccggtgggagagacgtgcaggggcacctgcagaggcctgggggaatctttgccacttgctcgtagggtcaaggaggggctccttgcagggcaggtggggacatccttggaaagtccctttgtgaatttctttgggtacaattaaagtatttacaggctgggtgcggtggctcatgcctgtaatcccagcactttgagaggctgaggctggcggatcacctgagatcaggagtttaagtttcgccaacatggcgaaaccctgtctctgctgaaaatacaaaaatcagccgggcatggtgtcaagcgcctgtaatcccagctacttggaaggctgaggcaggagaacgcttgaacctgagaggcagagattgcagtgagccgcgatcgtgccagtgcactccagtctggataacagagcaagattccatctcaagaaaaaaaaaatgccatctctctatgcctcactctttgaacatatgacacggtcctgcttcagacactttaataaaagatgcaaattaagccaagtgtggtggcttgtacctataatcccaactactccagaggctgaggcagaaggatggtttgagcccaggagtttgagaccagcctgggcaacagagtgagaccctgtttctttcttttttttttttttttttttgagacggagtctcactctgtcgcccaggctggagtgcagtggtgtgatctcggctcactgcaagctccgcctcccgggttcacgccattctcctgcctcagcctcccgagtagctgggactacaggcgcctgccaccatgcccggctcatttttttgtatttttagtagagacggggtttcactgtgttagccaggatggtctcaatctcctgacctagtggtccgcccgcctcggcctcccaaagtgctgggattacaggtgtaagccactgtgcccatccaagaccctgtttctaccggaaaaaaaaagtaaataatttagctgggcatcgtggtgtgcacctgtaatcccagctgctcctgaggctgtgatgggaggattgctttaacccaggggttcgaatcctaggagttcgaatccatcctaggcaacatagcaaaaccccatttttatttaaaaaaaaaaaaaaagatatgagttaaaactagccctgggatggcatttttcacatattggtaacaaacaaaagaattgatggccgggcgcagtggctcacgcctgtaatcccagcactttgggaggccgaggcgggcggatcacaaggtcaggagatcgagaccatcctggctaacatggtgaaaccccgtctctactaaaactacaaaaaattagccgggcatggtggcaggcgcctgtggtcccagctactcaggaggctgaggcaggagaatggcatgaacccgggaggcagagcttgcagtgagccaagatcgtgccactgcactccagcctgggcgacagagcaagactccatctcaaaaaaaaaaaaaaaaaaaagaattgataacagctgtgctgccaaggctattggaacgtaggaggtcctaggacagtgctgttgggagcataaataagcccaaccctgtggcgggaaattgggcatcagttctcaaaatgtcatgggctgggcacggtggctcacgcctgtaatcccagcactttgggaggctgagggaggcggatcacttgaggtcaggagttcgagaccagcctgaccaccatggagaaaccccgtctctattaaaaatacaaaaaaaactagccaggcatagtggcacatacctgtaatcccagctactcgggaggctgaggcaggagaatctcttgaaactgggaggcagaggttgcggtgagctgagattgcgccactgcactccagcttgggcaacaagagcaaaactccatctcaaaaaaaaaaaaaaaagaaataaaagaaggtatgttgaatatgagtggtatgccaccctcacattagggaagggcagtttcggggaggctgtatttatgtataaaatagccctaaaaggaagtgggagaaatgacaatattagctggctatgagaagagaggctgggaggctgtgggagagggcttgggtgtggagaattctttttgttttttcctttttttgagacagagtttcactcttgttgcccaggctggagtgcaatggcacgatctcagctcaccgcaaccttcacctcctgagtttaagtgattctccggcctcagcctcccgactagctgggattacaggcatgggccactacgcctggcaaattttgtatttttagtagagacagggtttctccatgttggtcaggctggtcttgaactctgacctcaggtgatccgcccgcctcggcctcccaaagtgctgggattacaacgtgagccactttgcctggctgagaattctttttttgttgttgtctttttgagatggagttttgctgtgtccccagcctggagtgcaatggtgtaatctcagctcactgcaacctctccctcccgggttcaagcaattctcctgcctcagcctcccaagtagctggaattacaggcgcccagcaccacgcccggctaatttttgtatttttagtagagacgggatttcatcatgttggccaggctggtcttgatctcctgaccttgtgatctgcccgcctcggcctcccaaagtgctgggattacaggcgtgagccactgcccccagccgagaatttctctttgcgtccttcctactttggggacttcgaatggtgggaaagagttatcaaggccaaaataaggaattcaaatgaaaacaaaacaaaatcaaagaagaaaaaacagaagagcactgggcaggctaggcacgtggctcatgcctataatcccagtgatttagaaggccgaagtagaaggatcgcttggaggccaggagttggacaccagcctgggcaacatagcaagaccccatatctacaaaaaataaaaaacctaaccaagcgtgctggcatactagtagtcccagctactcaggaggctgaggtgggaggatcacctgagcctgggaggtccaggctgtagtgagccgtgatgacaccactgcactccagcctgggtgacagagaaagaccctgtctctaaaaaataaaaactggccaagtagctttgggattagccttgggttccagtcccagcaaggcctttaatagcttgggacatgacttctgcatttactttgcaatcaggtgagacctcctctgatggggaaaatgacacggtgagtgacaaaggatgttctcctatcattgtgtcagggcaaggaagcctctgggtaaatgatcaaatgatcagctttgcttctgatttggagggtgggtgagcagatgctgaccttcccaggtgagggaagtccccgaacattcccagcagcttctggaaaccccagggaaacctctttgaaggtcttttctgcatctctgcctgataggtctttttttttttttttttttttttcttttttttgacacacagtcttgctctgtcgcccaggctggatcactgcaacctccatctcccgggttcaagcagttctcctgcctcatcctctccagtagctgggattacaggcacctggcaccacgcctggctaatttttgtatttttagtagagacagggtttcgccaagttggccaggctggtctcgaactctagacctctggtgatccacccgcctcagcctcccgaagtgctgggattacaggcttgagccaccacgcgcggctctgcctgatagctgagagcatagaactccaggtttgagacctggctctgccacatttctccctctatgactgtgggtgccccactttgccttagtttttacctctgtgaaatggagcagatggctggcacaggtagcaaaggagtaaaagttatgtgggagggtggtacctgagagagactctagcttggtcttgccccacccctggtgtaaacataaagaagcctccctggatggctcaatcttctccaaaaaggttagaggtgtaattcctagaggaggcgaccactagctgggctttgaaggatgtgtaggagttcataaggacaggcattctgggcaggaggaacagcctgggcaaaagttgggagcagggagaaatcttgatggaggcaggaggaggaggaggtaggttggtgtaggccaggtgcagtggctcacacctgtaatcccagtgctttgggaggccaaagcaagaggattgtttgagcccaggagttcgagaccagcctgggcaacatagcgagaccctgtctctaagaaaaaataaaaaaattagggtacagtggcatatgcttgtattctcaactactctggaggctcaagtgggaggatcacttgaacccaggaatttttttgtttttgtttttgtttttttgagatggagtctcactctgtggcccaggctggagtgcagtggtgccatcttggctcactgcagcctcctccacctcctgggttcaaccgattctgctgcctgagcctcccgagttgctgggattaaggtgcccaccatcatgcccagctaatttttttgtatttttagtagagatagggtttaccatgttagccaggctggtcttgaacgcctgaccgcaagagatcctcctgcctcagtttcccaaagtgctgggattataggtgtgagccactgagcctggtcaagcccaggaatttgaggttacagtcagctatgattgcaccactgcattccagcccaggtgacagagagagacactgcccctaaaaaaaaaaaaaaaattgattgatgggaggaagggtgaggttggcagagccttgaatgccaggtggaggagctgggactttccttcttggggtgatagggagtcatggagggtttctgagcaggccagggattagatagctgaaggctggatttactggaagccaatgagcagttggctatggtccttgtccacgcggcccatgttgtgggcagtgaccgtattcaagaagggaaggacagacaagtatttgaatacttcagtgaccaggatttggtaaaggactgcaggtcagggtcaagaagaggtgagagcaggacagacttcctccccgctgcaccaggcagctgagctgggtttcctctaggggctgaggtttgagggtacctcaagttctgcaagagtctataggaggtggtaagagagaagagctggaggtcagagttttcttgactatatatatatatatttttttgtttttgtttttaacagcttaacagctttctgttttatttttagagacagggtctcagggtctcactttgtcacccaggctggagtgcagtggtacaatcgtagctgactgcagcctcaaactcccaggctcaagaaatcctcctcccacccttagcctcctgagtagcagggactacaggtgtgagccagcaggaagcccagctggttttttttttttctttggtgttttttgtttgtttgtttgagaccggagtttcgctcttattgcccaggctgaagtgcaatggcaggatcttagctcaccacaacctccgacccccaggatcaagctattctcttgcctcagccacctgagtagctgggattacaggcatgcgacaccacacaaggctaattttgtatttttagtaaagacagggtttctccatgttggtcaggctggtctcgaactcccaacctcagatgatccacctgcctcggcctcccaaagtgctgagattacaggcatgagccaccgtgcccggcctttttttttttttttttttttttgagacagagtctcactctgtcgcccaggcaggagtgcagtggttcgatctgggctcactgcaagctccgcctcccgggttcactccatcctcctgccttagcctcctgagtagctgggactacaggcgcccaccaccacgcctggctaattttttgtatttttagtagagacggggtttcaccgtgttagccaggatggtcttgatctcctgacctcgtgatccgcccgccttggcctcccaaagtgctgggattacaggcgtgagccaccatgtctggcctggccaggctggtcttgaactcctgacttccggtgatccatctgttctggcctcccaaagtgctgggattacaggcataagccaccacgccatgccgaagcccagcttgtttttaatttttttttttttttttggagaaatgaggtcttgcaatgttgcccaagctagccttgaactcctggcctcaaatgaccccgccttggcatcccaaagtactgggattacagatgtgagccaccatgccccagccttgctttcttgagatacgatttagaataccataagattcatcccttttaagcacataattcaatgacttctgtacaaacaaccatgactacaatctaattttaaaatatttcaatcactctaaaaaagaaacctcctgcttatgtacagcgactctgtctacctcttaagtgaattctcctacctttaatagccctattttacagttcaggaaactgaggttcagagagacaaagtcacttacccacagcaaagaagcaaggctgggtatcaaatgcaggacccccccggtcctgatgctttttttttttttttttttttcctctgagagagactctcactctgtcactcagtctagagtacagtggcgcgatctcagttcactgcaatctctgcctcctgggctgaagtaatcctttcctcacaagtaaacctcagcctctcaagtagctgggactacaggcacacaacaccacgcctggctaatttttgtatttttaggtagagacggggtttcactatattggccaggctggtcttgaactcctgacctcaggtgatccgcctgcctcggccccccaaagtgttgggattacaggcgtgagccaccacacgcagcctttttgttattagactctgtcattactgacttttttttttttttaatagaaacagggtctttctttcccaggctaaagtacagtggcatgatcacagttcactatagccttaaactcctgggctcaagtgatcctcctgcctcagcctcccaagtagcagggactacaggtgtgcaccaccacacccagttaaccattcattcattcattcattcatttattttgagatggagtctcgctctgtcacctaggctggagtgcagtggcacgatctcagctcactgcaacctccacctcccaggttcaagagattctcctgcctcagcctcccgagtagctgagactacaggcgtgcaccaccatgccagactaatttttgtatttttaatagagacggggtttcactctgttggtcaggcttatctcgaactcctgacttcgtggatccaccctccttggcctcccaaagtgctgggattaaaggcgtgagccaccgcgccctgccaacctttttttaatttttcttagagatgggggtctccctatgttgcccaggcttgtcttgaactcctggcctcaagtgaccctcttgccttggcctcacaaagtgctaggattacagcctgagccatcacacctggccaacaggtttttttttttgttttgttttgttttttaaagaatgtctaggccaggctcatttactttcacctgtaatcccagcactttgggaggccggggtgggcagatcacttgaggtcaggaattcgagaccagcctgggcaacatgctgaaaccccgtttctactaaaaatacaaaaattagctgggtgtggtgacacgtgcctgtaatcccagctactcaggaggttgaggcaggagaattgcttgaacccaggaggcagaggttgcagtgagccaagatcatgccatcaccctccagcctgggcgacagaaggagactcagtctaaaaacttaattaattaattaattaaaaataaaaatacaaaaattaacctggtgtggtggtgtgtgcctgtaatctaagctactcaggaggctgaggcaggagaatcccctgaatcccagaggcagaggttgcagtgagccaagatcgagccactgtttgcccagtctagtgcactgggctgctgaatttatttgaccagacacctagcaatagactttgaagttcttttccacttttcactctaagatgctgctgtcatgaataaggaatattttgatccccttcacaaacactcggggccctcttaccagttttcactgaagatcttgacattcctatctgcttaggtgtctgggcgtgtttgggggagatactgaagaggtagggctcccaggcaggtgcagttcgtctgttaggcaggcagcaaggtccacttcaccagacacccccacctctgttttcctgcagggactccagaacgggtggaactggcacccctcccctcttggcagccagtgggcaagaaccttaccctacgctgccaggtggagggtggggcaccccgggccaacctcaccgtggtgctgctccgtggggagaaggagctgaaacgggagccagctgtgggggagcccgctgaggtcacgaccacggtgctggtgaggagagatcaccatggagccaatttctcgtgccgcactgaactggacctgcggccccaagggctggagctgtttgagaacacctcggccccctaccagctccagacctttggtgaggattgaagaagccagcagggagaaggtgggggtggggtatcctgcaatgcggtgcctgtggccacaggatcttttgagatgggtgtggccccggctaaggggtgcatgtgttctaggcgtatgtgacctaggctgctgagtggccctggaagaggatctcgcaggagggggaatgaaatgccccagagaagggcttcgggacgtccatccctgtctgctcacacctttcttctctccctagtcctgccagcgactcccccacaacttgtcagcccccgggtcctagaggtggacacgcaggggaccgtggtctgttccctggacgggctgttcccagtctcggaggcccaggtccacctggcactgggggaccagaggttgaaccccacagtcacctatggcaacgactccttctcggccaaggcctcagtcagtgtgaccgcagaggacgagggcacccagcggctgacgtgtgcagtaatactggggaaccagagccaggagacactgcagacagtgaccatctacagtaagaaggggcaggggcggagtggggcttcttgggggtgtgacctgaacccggggcggggctcactgtgtgcctattccaggctttccggcgcccaacgtgattctgacgaagccagaggtctcagaagggaccgaggtgacagtgaagtgtgaggcccaccctagagccaaggtgacgctgaatggggttccagcccagccactgggcccgagggcccagctcctgctgaaggccaccccagaggacaacgggcgcagcttctcctgctctgcaaccctggaggtggccggccagcttatacacaagaaccagacccgggagcttcgtgtcctgtgtgagtggggctgctggtcaatggcccctatcccccaaggcccaatctccctgaaggtcccataaggtcttgcctccaagtcctgcccccacccacctccatgtcatctcatcgtgtttttccagatggcccccgactggacgagagggattgtccgggaaactggacgtggccagaaaattcccagcagactccaatgtgccaggcttgggggaacccattgcccgagctcaagtgtctaaaggatggcactttcccactgcccatcggggaatcagtgactgtcactcgagatcttgagggcacctacctctgtcgggccaggagcactcaaggggaggtcacccgcaaggtgaccgtgaatgtgctctgtgagtgagccggcgggcagagctgggtgggggcaggggccatggacctaatgcaatcctcaccgcctgttgtatcctccccacagccccccggtatgagattgtcatcatcactgtggtagcagccgcagtcataatgggcactgcaggcctcagcacgtacctctataaccgccagcggaagatcaagaaatacagactacaacaggcccaaaaagggacccccatgaaaccgaacacacaagccacgcctccctgaacctatcccgggacagggcctcttcctcggccttcccatattggtggcagtggtgccacactgaacagagtggaagacatatgccatgcagctacacctaccggccctgggacgccggaggacagggcattgtcctcagtcagatacaacagcatttggggccatggtacctgcacacctaaaacactaggccacgcatctgatctgtagtcacatgactaagccaagaggaaggagcaagactcaagacatgattgatggatgttaaagtctagcctgatgagaggggaagtggtgggggagacatagccccaccatgaggacatacaactgggaaatactgaaacttgctgcctattgggtatgctgaggccccacagacttacagaagaagtggccctccatagacatgtgtagcatcaaaacacaaaggcccacacttcctgacggatgccagcttgggcactgctgtctactgaccccaacccttgatgatatgtatttattcatttgttattttaccagctatttattgagtgtcttttatgtaggctaaatgaacataggtctctggcctcacggagctcccagtcctaatcacattcaaggtcaccaggtacagttgtacaggttgtacactgcaggagagtgcctggcaaaaagatcaaatggggctgggacttctcattggccaacctgcctttccccagaaggagtgatttttctatcggcacaaaagcactatatggactggtaatggttacaggttcagagattacccagtgaggccttattcctcccttccccccaaaactgacacctttgttagccacctccccacccacatacatttctgccagtgttcacaatgacactcagcggtcatgtctggacatgagtgcccagggaatatgcccaagctatgccttgtcctcttgtcctgtttgcatttcactgggagcttgcactatgcagctccagtttcctgcagtgatcagggtcctgcaagcagtggggaagggggccaaggtattggaggactccctcccagctttggaagcctcatccgcgtgtgtgtgtgtgtgtatgtgtagacaagctctcgctctgtcacccaggctggagtgcagtggtgcaatcatggttcactgcagtcttgaccttttgggctcaagtgatcctcccacctcagcctcctgagtagctgggaccataggctcacaacaccacacctggcaaatttgattttttttttttttccagagacggggtctcgcaacattgcccagacttcctttgtgttagttaataaagctttctcaactgcc

SEQ ID NO: 30 - DNA, 405018 bp, Homo sapiens
  DNA (1)..(405018): ROR1
gttgagcgagagagggagcgtggagagctggagcagccgccaccgccgccgccgagggagccccgggacggcagcccctgggcgcagggtgcgctgttctcggagtccgacccagggcgactcacgcccactggtgcgacccggacagcctgggactgacccgccggcccaggcgaggctgcagccagagggctgggaagggatcgcgctcgcggcatccagaggcggccaggcggaggcgagggagcaggttagagggacaaagagctttgcagacgtccccggcgtcctgcgagcgccagcggccgggacgaggcggccgggagcccgggaagagcccgtggatgttctgcgcgcggcctgggagccgccgccgccgccgcctcagcgagaggaggaatgcaccggccgcgccgccgcgggacgcgcccgccgctcctggcgctgctggccgcgctgctgctggccgcacgcggggctgctgcccaaggtaagaggcgcccgccggcccccgcccgcccagaccccctgacccgtggccacccttccgccgtccagccgggcgcgggacacgcaggaagcgccgcgctggctccggggcgcgtccggccacccgccacggggctcgccggcgccgccaggccagggtttgccccggagccccgccaggccagggtttgccccggagccccgcggcgggccggggcgcgcccagggactcgttcctcggtgcgcagcagcgattgtcagcgctgacaggaagcgtggaggggtttgagggtcctgggggtgatcggggcacttctgtgcagggcgtccccccttgtctccctggacctctagcgcgccccagccggtgttcaggcaagtctatcctgcccccaagttgcgagccggcccggaaggcgcggtccaggagggagtttggattttcagtggtgctcgccagagcccaggcggctcgcggatcgacgcaaacaaaagccctgtcctcctggggctccggcggcctcgcatcgccaccgcccccggccctccggccctcccgagagtcatcatagaggccaaaacttgtgcgccgctgcagccgctgccactttgtgcaaaatgtgctgtcagaggcggcctgcggctccaaagtgctttgggtgtgcacgcgcgcgcgcgcgcgtgtgtgtgtgcgtgttacaaacaagagggggaaaagccatctaatgcatatttgattttggtaatctctaaagacaatcgcaacagttagagaaagacttcaccgcaagccggagcgtcttagttcgctgcgggaagctggggtccttgctgcgtctgagccggtacacaatgagagggaagagcccggctgagcctgtggagacaaccgattcattctttggaggttggagggggaaagttgattaaagtctccggggtctcgggcctcacttttaacatgcatcccttgagggggtgaggagcctttggattctgccctcccccactcccagccctaaacctgagcggataaatagatctctgctcttttatcatgcatctttcatttttaagttagcactgtgtttaggaaaagaaaaagttctgcgctacttagcagttgagaggaaaaagatgtattcactacatagactacgaatgcagaattagtttttactaaaagttagctgactttcttggtagaaaacacactctggaaggaagttgtgtgaaattttgatttcttagagatggtttttggaagctagagtagcattttctgaggatgatttctgaaacggatcctataatgtggtcgtgctaatctgaaagctcctgggggtaaatagagctcctaattgtaattaagatgtgcatcagcagggagtgcaccttcctgatgaaaaatcctaatgaaatgtaaacagcttggtcacatagatgttttgcttggtgatgccaaacatctggccttgcgccacaacacctgggtgaaaagtaaaaatgggccatgctgcctaagtaatgtaaacatccttctcaagttgggttgcccagcaaattgaggtggagataagcagggtgattttaactaaggtgggactcctggcttggggctttggttaattcagttatttcccctgtggactcctttactttgtacttcacctttcaacaatagttgcttttagatcatagccccttgtgggggtgggggtcacttacctttaaatacatgtccctgcattgattttgctcactgtaaacacccttcttatcagcagccaccccaattctgtctcctttaactgtttacagccttttagagttgtttaaaaaaggtattgcctattccattgtagcaggaggagccacagacaaaactcctcagacacccagtgagcaattcctgtcccttttaagggctcacaactctaagggggtccacgtgagagggtcatgatgggtacatgactgggggctgcatgcactggtaatcagaacgaaacagaacaggatagggatttttacactgtctttccatacaatgtctggaatctatagataacataaccagttatgtcaggggtcgatctttaagtaccaggcttaggtcaggcaggcccaggcctggtttcgggtctggttccttggtttcaggtctggttcctaggtgccgggctacctgcctttaatttcgcttctctttccttttctgagtataaaacaatataaaacaatatgagagggtctgtctctcttctctcaccatactctttagtaatgagctcaaatctgttattattgtcttatttgttgttttataaatccctttccattttgtgaatgtttgatcttttctctggggtcaagacttctggtagaactcacgtttactttctcctcttggactcaagattcctaaggtagcccagccagtggctcaggaaatcagcttaagcggagatatgtttcatgtatttatttaaaaagatacaaaacatttctcccatcatttttctattttgttagccaggagaagaaaacctttaaatttattttttctggtctgtccattgttgatttctcatctaccccctccctatgcaaagctcaacttctttaggaacctgaagcttaccttataactgcacccaagcccagggctttaggaacctacctggcctttctcaaaatcttatagattctgtggtttggctgctgggagccagagggaggtggcttgctactgtgtttgctatcattttgtaaaccttccgttgccatttaaataggtatttgtctgtacttttagaatagaagtgtcttgaaggcaataagactgtgagcttttctggtgaaaacactgagagcccaagtccactagtcccaactttattagagatgcctgaaaatcctccctggctggctagggggagccgaaccaaggtgggatgggcaaagggtgtggtcaaattgtctccttcagttttggaaatatttaatttccaatatagattcagtatacatggtaggctgttttgcttctctgatgcctgggataatctgcctgatatttagtgaggggtcagctttgccctatagcaccctttctcttctgtatcttgagcataggcccccagttagacttttggaaagtttctgaaagtgtcacttgctctgaaattagtatcaggtttggctggtggtttgatggtgaacatctaccccatttcaaatatttctgaaaattttacacagcatcctatggagaatggaacactttgtaagctatatgtactttgatgtaaatgtatatgtacagatagcatatgtatatacacacatatatagtaagtggtccatagatatttgttgaatgaatggagaataactttttcggttgtatgcaaaattctgatatatgctttgcttagtaaaaatgcaacatggcatattttcaaggatttttccttttcttgtcccatcttctagtatgaaagaagtgtagtgtagcagaacttgacagtaaagctaaatggttacaagcacaggctttggcatttaacagacctggatttgaatcttttctctgttgtatagtgggtgtgtcagttttcctgagcctttcaagagtgttatgagattgaagtgaggtcatgcatgtaaagtactggagaacagcacccagccaagaggtgagtgcgtgaaattaatttggggtacatgaaattaaggatatgtgaacttccagaaataatatacacaattttatatgcatttttacggttctgtatttatagctatagctataatcttattttccaagaaaagtgtcaacctctgaacgataggaactgctgacttggagtgtttgatgcctgaggcaatgggttgtcttcctggggaggctgaaaggagttgagtgttggtggctagttctaggccttatcccaggttaacacactccatggaggccccacttctcacctcccagtttcccttccaccaggcaggctgttaattgggcctgagagaagctgaagaatggtgccaagtccttgtgacctcaagtaagaaaatatgtctctgaatccaagcattctgagatgcaatttgtacagtttatttaacaaacacttatctaatccttacaatgggccaatcactcttctaagccttttgcaagtattaactcactgaatcctcacaacaaccctataagggagatagcataattagctcattttactgatgggtaaacttaggcacagagaggttaagttactttctttaggttacactgctaaaaagtggcattactgggcttacaagccctaacagttcatgctcttaccttagtggctgtcctagacattctttccttgtttaattcttacaatttatattcttttaatgtatggaacaaaggtggtatttcccaaggttttccaacagcagcaaagggaagcttgcttagctgtaatctagaggttataagaaattattggagacagccaatttcaatttcccttcgagtgctggagttccctaagacggtcttgctgaaactcagagatagactggaagcaccttgttggatggcctggatctctggttctggaagaattacatttttgtaatgagcttcaactttgatgtggtttgagaagtgtgctcgccagttttttccaactatcaataagctatattttgatgaagtgactttgtatttgcatcttggtggacaactgtggttgtaggctgagaaggcggggatttattagagtgctgtctagtgggacagctggcttgccagctcaaggtcccagtgaggaccagaccctggcaaatccagctccagctgagaaacactcacgtcttcaaggcctctttctcaaacagaagggccttagcctggcttcacccattccctggggtgtgacgggagagactgttcggtagaaactggaagagaaaggagagtctgagaaagttctctggagttgaagggggaggggatgggggcaactcttcgaaaatccttaactaaatgcagctgcttgttacacggagactgacttgcatgccaggaatatctaaaaagctaacgaatacaaaataaaaataaacagcagtaaaaaggctctctctttgttgcagtaagctcagttggggttttcagtttgtttaggaatgggataattgtggcatccactttattttggtaaggcagtgaaacgtggattaatgttatgtgattgggatgctaccaccatctgaactttttccttcatcccctgcccccagccacaccccccagaacacccaggcatggacatccataggacctgagtctcaaacagttgcccctgagtgaattacattggaagagggcagataatttaatgggataatcttggcagggccagcaaatttcacacctcatctctcactaatagaaaggcagcagaaggctacaacatcctcagatgaaaaggttgtataaaaaggctctgcttaacagtaactgtctgtccataaataaggttttgtacagtcttgatccaaaagctgttatgaaatactgataagccaagcctcataatgtttggcctccttacatttccttttcctgcttctctccatagaaccatagatttttttttttttaagagagagagggggactaaaaaaaagatcaacagtccaaactttatttttttcaagtatttctatacaggatggacttcctttgatagctgcttaaagaggtggcgtggagtaatggaaatagaatgggatttgagcctgatagggaatgggggtttgaattggggctttgttgccttcttgggcaaagttacctaaacttttgagcctctgttttcttatctgtaaaatgggaataacaataatatgtggcttactggggggttttgtgagaataaaaggatgttatgaacttatagcgcctaacacagcaccatggacttagtgaacgtgaagtatgttagccaccatcattatcaagggcttactgaagaaatttgaaaatctggcttcaaaacgatggtcctgctgcaaggtagcaaccaaggctcagagaatagcaagttttacaaggttttaggactccagagtgttttgttttatagggagcatgcagatgctctagatctgagcagtacccaggccagtgctggggacctggatggaagggattccacagtgcagttttgcaatgccttaaaacaaaggcttttttcagaacagcaagctctttggggaagagcaacccctcccaggtgcttagtgtaattccagaatcctacaatggggaatgttacatttcagggacctccacttgtaatctgaccgtttttagctccaatatccaaataatcttgctgagcacaacttgaaagagaaggataatggccggaggaaaggatcctgaggtgctctgtttgccatttaaattttctgagtagaagaaaaaaagttcatgttacccaaagagagaagagtaatgaagcgtgtgggaagcaggaggggtgataaagaggacttctaaagacaaagcagaggttgggtttgatattttatttttcaacagtgaagcttgtcactcagtgtatttcaactaacatttattatatatttatcacatgaaagatacagtattcgtgtccaggaataaagtattaactttgccctcaaggagagaggagaaaaattctcacttttttgagcacctgctatatgccaggtatcatttttttaaagctattaaatttatgcttctcagcactccttggagtttggacttctgatcctattttacagataagaaaatcgaggctcaggaaggtaagtatctcagccaaattcgtacaatgattaagttgggatttgggatttgaatctaggtattttgactctcagatgtatgctctttttgttatccttaaagtgtgattggggagacaccaatgagcagatgtggtaccacaggcaactatctctcccacaagtgaattataggaaagagttgtggaaaaaatgctgtgggaacatggggaagaatacattaattctcaggggattagagggtcagaggaagaacatgagtgcctccttcataggcttattgtgaagagtcaatgaaataattcatggaacacactcagactgtgcatagtgagcgctcagtgagtgttctgctatagttatgtagccagtgagaggcctgatcaggatttatctgcctctaaaacccatgtactcttgctcccctgtgcactttttaaacagacatgtgattgttggaagagtaagtaactgtgcagtcaccaaatgaaagggaagacaccaatacagttgctctggtatattcaccacctgccctaatcctggcttttaggactggactgctttgggtatgggaggggatttggatagatgtggggttggaaagaatcaagatgtctcatcatgaactatagcgctcctagaactctggccaggatttaccacctgccctcattcattcattgatcatacattttctatgcacttacagtgaaccaaatattctgatagtctcactggagatgtaaagatgaataaggttagatcattgccttggagggtttttcaaatgacagatttatggcagagattgctagctgatcaccaaatatgtttccatctcttccggtcatatgactagacaacatttctcagctttctcacagttaagtgaagccatgtgactaaatactagccaattaaatgaaattggaggtaatttttgtcgcttgtaggcttgacccataaaaaactccccaggcagaatcggtatgatccttcttcggtggcttgacaaccttagaagtcatgtgttgaaagtgtcacaacgtggaaagagcctgagactctcccttaatcactgtgtggtggaagccacacttgtttaggttttatgtgaaccaaaaacaagtgtccattgttaaggctgagattttgaggttttttttttttgtttttttttttgttacagctgctaatgttaccttaactaacatgaggttgtaaatcagtgtgtggtgagatcaatttagtgggttaggaccagcatttttagatagaataaaataggaaacctggtttgtgtctgaccacttcatgcagacctggggctccatccagtaaattaaaccccttcccaaataatttatggcacacatagggtgcctctagcactgtagagaatctagaagaatgaagggtggcctttacccttggggagtttaccttttaggggcagtaaaataggcactttatacagccagtgagtacagagttggcaattatatatgcagaatccctagaagggtgggtctttcgggaggaagtgtgatatgatgtgagccttgaaggaaggattgagagggtgcgggattgaaggatgggagatgggaagaggagttggacatttcactgctggaaaagggctggagttccacagcagcctgcagctgctctgggggtctccatggactcgctgagactatcctgagttcttaaaccaggccttcactgtggaatgaagctgatctccaggggatgggagagtgaagaaaagaaagacagcgttgaatgaagcctgttgtgtttttagcatatgaagggtggaggaggagagagaaggaagcagtttcactgggagcctgaagacttgtctttcttcccaaagggtgtcccagggagttaaaaatgttgtgcatttcagggctgcttgtcaaaggtatatgatggtgtcttattgtctctaatgcagccattttctcttatagtgcaggctacttaattctattccccctcttgtctgcttgatgaaaagaataatagtatactaataattaacacactgagcatactgtgggccaagtactattctaagttctttaagcgatttaacttgcatagtcttcaggacgaccctatgaggtaagccagagttctaggagcattattgttcactattaggcatcttgattctctccagctccacacctgtgtgaatcctccaccatgcccaaagcagaatccaggctaaaagccaggataagggcagatgggagaaaatacaagacgaactgtcttggtgtcttcccttctatttggtaactacacaactacttactcttccaacgaccacatgtctgttgaaaaggtgcacagcagagcaagagtatatgggctttagaagcagattaatcctgaccaggtctttcaccggctgctgaacactccttgaacactcacaatgcatgtggcagggtgctcagtgtgttccacgatatccccattttccagataaggaaactgaggcacagagaagtaagtaacctgcccaagaccacacagagagttaaatgggaaaactaggatttgaacctgcatatcctaaggcctgagttttgttcctaatcattattatgccaaactgcattgcagttttttttttcaactctgtctgatgattaaaattctctgtaagatcccagccaaatagctgagtcaaaataattataattaaatcctccatttgtatagggctttgcagcttacaaaatcattttatgtacagtattacctttaattttccaaaaaatacagttaaataggatttatttctctcttccttttaaaagtaggcaggtgagtttggcagctcacacaaggtcactctgtagctgtcagggcctgtctaaaacccagccccttggacttagggcccattgaactttctgctctaaagactacttttgtttggaatttgtgcctctaatatactgatatatgactattttcactactgtttcaccaaaaggtgaatttgcctgattttcacttgtttcatccacaaaatcttcaaatagctgttgtctttagaaacagttgaaaggcatttgtagatgggacctggctctgggatttctgtaacctgggaaaatttacttgcaaaaagacagagaagttacttaaaaacaggattttcctaagtggttggtgattgtggcagggagaggagccaggaagagaaggactttggcatcagatggactaggctcactactgctctgccaggtcagcaaactacgtaacctctgagactggctttcctcacgtgtaaaatgggagccataatggtgcctaccatgacagagggggaaggaccatgggtagtgtttggcacagtgcctgggccatagttggttgttggtgtgtgatcgaagctacatctctcaattgaatggagagcagcaattcttcctttaagatttttcacaggatgggatggggcaaaattgctagttctcagcgccttgttaggcatgattttataatacagttatctctgacacggactttcttagcacctggaaatcttaggttataattatattgtttctcaagggcagggactttcttatgctctgtgaaggttaaacatcataaggtaaaaatagaacatgctgcctgaaatcctagataccctggaaaggctcttatctgttcttcatgggaaactgacaccatttccggatgggtttagacaatgtacatgaaagcaacttattctactttttctccataagagagattatagccttgcttctaggatttcactccaactggggtgtttcaaagtttttacataattttcacaccccctggagagtattggctgtttttcttttttctgcctgaacttccattgtggtgatggactgtattagcctttcatatgcctaccttaaagaggtaatgcttaacccagtcatgactgttttatctcctcccttcagagaactgttgtgtgttgtatggggattttcagtcccaagatattgcctgttggagaccagtggtgtgtagaccactgaaaacaagcagcaactatatatatatatattttatttatttatttatttatttatttatttaattttttttttgagacggagtctcactctgtggcccaagctggagtgcagtggcacgatctcagctcactgcaacttctgcctcctgggttttttaagtgattctgctggctcagcctcccgagcagcttggattacaggcgcctgccaccacgcccggctaatttttgtatttttagtagagacagggtttcaccatgttggccaggctggtcttgaactcctgacctcaagtgatctgccccgctcagcttcccaaagtgctgggattacaggcgtaagccaccgcgcccggcctacgcagcaacaattttcgatgatgttcttaatccaccagtgatttaaacctctttttctctgtgcggctcatagcgctttgcccactcacatctggtgtccctaagtcaaagcattgaaaactttgcctgtgaccaggtagtcttcagtgggttagagtctgctgtcagggcctcccaggggacacgtgataactaatgtcctttttccccactgaggaaggggggagctgaactgagcatgtccagtctgtgctacccagctcatccctaagttgctgcctaggactgtgctccgggcctctgcaaggaggagttagtaaaggtgcagagaaagtccaggacttaacactgattagtcttcctccccagaaagaaagcacctggcacagggaataaagcatttccccccttacgctggctacaacttgattttttttttttttttttttttttttttttttttgagacagagtctcgctctgtcgcccaggctggagtgcagtggcacaatctctgctcactgcaagctccgcctcccgggttcacgccattctcctgcctcagcctcctcagtagctgggactacaggcacccgccaccacggccagctaattttttgtatttttaatagagacggggtttcaccgtgttagccaggatggtctcgatctcctgaccccgtgatcctcccgcctcggcctcccagagtgctgggattacaggcgtgagccaccgcgcctggcctttttttttttttttttttttaaggagcaattgtcagatttgatggttgtgttggggttaaaactatgtagataaggtggtcaaaaccttttagaaataatcctcccacatctttcctgagggcttaggtttagaaagtttcttagccatcccaggatgtgggtgaaagtggcttcccccagactcatcaaatacacagagcaattgatctgagtgctggtggatgggagggaaggaaaggaggggcccaagaggcgcagctccacctgcccgagggagacgtcctgtgtaaactaacaagaagtcactggtgcttcggtttggttaaatactgatttagcaactgaaagggatgcaggagaaatatggcaatatcctctccagtaagaagtttactgtttttgttagggaggcaagactgatacaccccaaacggtatgggaataatgaattgatccaaatgtcagtggcctgcccttggtttagggccctttgcctatcttgaagcctccaggaatttctaccctcacaccggcctacctccctggcatatccagctcagactctttcctcttttcatttcttcttgctgaattcttgttcttcaaactgtattgcatccacatccaggaaggcaccctggcctgtttcagcctgtcagtccttcttttgtcgtctcaccttccaccagtattctcacataggccgtctaaatcacacctgcttatgctgatttagcccaacacctttgcaataattgtcactgtcaagtattaagcattgactgtggacccagcacctggcaaggcattttgtattttgtagtggaatcatattattttctccctgtagaactattgcctttctttccttccttccttccttccttccttccttccttccttccttcctgccttcctgccttcctgacttcctttctttccttccttctcttttttttttttttcttttttgatggagtttcactcttgttgcccaagctggagtgcaatggtgcgatctcagctcactacaacctccgcctcccaggttcaagcaattctccagcctcagcctcctgagtagctggaattacaggcacctgccaccatgcttgcctaatttttgtatatttagtagagacgggttttgccatgttggccaggctggtctcaaaatcctggcctcaagtgatccacccaccttggcctcctaaaatgttgggattacaggcataagccactgcacccggcctatcgccctgatttcaatccctcatctgtcactccctcattctgggaaatgccccttcatcagtttcaaaaggaactaatcatagtctttccttgggatttaggggcagcccttctgggatggggaagctgagagatgcccttggtcatgtctgagcccaggaaagaagctggtgtgtaggagagaatgacttcatatccagagcaggcactcctgagaggcagaagaggtctgacagcctgccaatctcttttccacctccctggggtttccttatctgagccagtagacgctgctttcatgaggttattgtgttcctacaatgcacacagcctcacctcactaatcctcataacaaaatgaagtgggtgttatcctttttttaaagctaagaggaagcagtttgattgctttttctgatgagaacatttatatccattaaaagcaaattcagaaatgtataatgaaaacaaatttcacccattatcctaccattcagagataacttctgattgtgtttatacacgtggatttataaaaggaggttatgcttttattcccaaaagaaaactgaggctcagagatgttaagtaactcctctagggtcaaaaccagtgcaaatcactaaaacgtgttgactgtctgttaaattcaatgtaattaagtgccacagggagttacaggcagtaggttttgtggatcaagaaggaaagaggccggcattgattggaattactgggagggttttctgaaggaggtggggcttgacagagtgatctaatatatatattatatgttatatatatatatatattttaaggcttgttttattttaatggctgatctatataatcacagaagccagtatgtacagacaaagtggaagtttttatttccttgtctcttcctccttggacaaggtcttgatgatttcctccttcttgacctggaggcactctttatggcgcttgcatgcttccttggtcttagacctctgggcctcaacctggttagccaggagcttcatgcgagccttatctgccttcagcttgtggatgtgttccatgagaatcgcttgtttttgaacacgttccccttaaccttcaggtacaggctgtgatacatgaggtgatcaatcttcttagatatgcggtatcttctgagcagccagcacagaatcctcattctcctcatccacgtgaccttctctggcatccgggcattggttgtaccctttcgcttacctatgcccatgtgcctgcccttccggtaggccaaggtgttttcctggcatcgagcctgggaatggacagtcattggcttgcggatcatcagcccatctttgatcagcttccagatctgctgacaggagttggcattggagatttcattggtttcattggggtccaaccagaccttcttcttgccacaggggaggaccctagaggcaagcctcttctgaagcctgagcatactcatggctgtgaccatagcagtgaaaggtgagtgatctaatattgacttgattcctcccattaagtggcctctgagtgggcaaagccagtgaatggggacacctgagcactgcctgctgtcgggactgggcactgcctaagacaatgattacttttgagcttttctgaagtgaaaataagtcaatgtgaacatggcaaagagggacagaggaagagacttatggtatctagaaggaagttggcaggtaacagggtgccaggaaattaagacctaaagaaatagagtggaggagaaggagggtgggggcacaacagtggattgtggttttgcatttgaatcaggaggaggaaaaaaacacccatccttcctctccttttttttttttttttttttttgtctttaaacaggcactgtcactctcttttgggattacttatttatatgtttgtctctccctctgcactgtgagatctgggtgaggaggaatggtgtttaattttcatgcatatcttcagtgttcagcacattaagcctggcacaaatcaaagagacactcattaaatatttttcaaagcaaggatccactgacatgactttcaggcaggccctcccaagctgtctacaaccccctctgtggtctcatagggcacctatgcacatattggcttttcatgggctgttccctcccacagaagcacctttcccccacccatcagctacagtccttctgtcttggctcagatgtcacatccctgactcaacaggtgagattagatttccactcacatgctctcctagcactttgtgttcttaaataaccttcattataatttgtcattgaatatttatttgtgtaatgactattttttgggatcttctctatcactgggttggatgctccttacagtagggtctggttctggatctcctgagcctgggccagttgaatggattctgcttttacttttactaagcattgttcttccttcctagaggccgagataactccagcttaccttggtgtgactatctaggaatttaaaaacgcgtcttcgaacaactgaaaatctccaggctatctcttccaacagttgaggaatccagccctgtaaaaagtcaatcaggctaaatgacacctgctgtgagttctgtttgcaggagagcaatgggcagctccagagctgggctgttttcccaacatggagtctgtgataactgggttttgctgctataaattagggtcaccctgctcttaattggcaaccaattcagattctcccttacaatcctcctctttctcctttttcgtgtggactgtgtttgagagaaggtgtggaaaatcctggcactgtgctacagggacggtgcacctgcaagctgggaatagaggtggtgaatgctggctgccggccctcagcacctttttctccctccctgttgctctgcccttccctgtcttttctcaggaattttgaaagaggtctcattactagggaaatatcccctggggagctcttcctctctcttctttctctcaatgagtagaggggaaagtgttctcagttttgaacctgcaagccatctggatgcaaagatggccagaaatgcccccttgtctctggatttcctacagcaactctgccttagcctcccagtaccatctgcttcaggctgggacatctttccttcatgcaggagaaaggggagcttaataaaattttgctggggtttcttggggcctgaggcagtagtggggaggagagaagcctgggctgttttatttcttgcacctgctatgagtcaggagtggtccttggtcagcaggcacatggaggcctgctgggtgccaggcattgggcaggtgttggggctacaggattatctgctaggacctcaaagtctggccttgtgggcagcgtgaaaacaatgatggtgacacagtgagagtctgggcacaggtcctggaaggtgtggagagggagcagccaatgcaggctcctgttagagtgctggagacagaatcaggaaaggtgactcaggggagtcacctttttttcactggaaaaaaatatgtctgggaggcactaaaacaagagcccattatgtgttttaaaatgatattagtaataatgtaggggtttatttggacaaatgagttcacaaaattgtgctgcctgtaatgttgattcttgactgagggataaaactcacttcccaggcccctttctgtaagccagttcccaccatccccttgaacctcagctgctccaccagagtcaaagcaactcagaaggaggctgagacccccatgcctcattgctaatcgatgggcatggtggatgggcatgagggtggggttcaggaccttacctagcatctgtcttcccagaatgttgctctgccctttctggggataagaggtcttagtttctttatctctataatgggaattataatccattccctgaagattatggaagattataggaggtaaaggctataaagtcaccttgtaaacctaaaatcctatctgagatcgaggatttagatggcaagtaccattttgtcttcatttcttggtgaagaaggatccatgaggcctcctttattcactcaacagatatttacgtggcaggcatcattcttgatactgagggtaaagctgtgaacaaaacaaagaccctggtcatggaggagtcaggaaatacagaaatatacatgacagcaggtaacaggaagggccaagaagaatgagcagggtaaagagcttgtaaaggaggtggggtgggtgctgtcgcatggggcagtctggcaggcctctaggtttaggggatttgagcagagagacctgtgtgaagggaaagggtgacccctgagactgtctgagggaggagcagtgagtgcagaggcattcaaagcaaatgccttgaaatgggagtgttatcagtttacagtacaaccagcaattgcttctactaccactggtaatatttatagagtctatactgtgtgccaggcagtattcaggtgccgcgacaaccctattcggtaggtcctatttttatccttcccccatgtcacagatgaggcattcttagaacaaaccaagcatccagataatacgaagagggagcagttctcatttacatggggagtgtataagtcacagccctgcacagagggaacagtgtatggtttggaaagaaaaaaaatctcagtttgggcctggcctgctactcatctgctgctagggcaagatgtttcacctctctgggcttctgtttcctgatttataaaatgggctaataaaatctcagaggattattatgtatattaagtgagagatccaagtgaaagaatgtttcaaactgcagggcaccatgagaatatcactttattcttcttcttattacgccaattctcattccttgcctcttgcaaagagagagaatgagagaaaaatggaaacttgcaacttacttaacttccttggttctttccctgaaaacttattttctactaatgtctgtgggagtgaattaactagagtatccagttgaattaagtattttgctgaaagatgaagggactgtgagataaagttggtgccgaggattctcacatttctaaaggaatcacttgaggtgctaggactcccagtccactcttccacaataccagacaacctgtaatcctcagacccagaatcttatgacagctttctctgatttcacattgtgtagattagctacccaaaaaagtaagtggcctcaaatagtgctgccctttaaaattattctatgcatttgtcccagagtcttgtgggatgaatggctaaatcctactggattaggcgagatgggtattattatctggggctacagaatggaaaaactcaggtgaaggaagttatcccaaacttcataattgatggtgagcctggatactcattctcaaatctggtgaggcatcgttggcttctaccatgatggcgatggtaagctcatttgtcaatcaaatgatcgattggcagtagggtgatgacagttaataataatctattatatatttcaaaatagctagaagagaataattagaatgttcctagcataacattatggctatcccagttaccctgatttgatctttacgcattctatgaatgtaccaaaatatcacatgtgctctgaaaatatgtacatctattatgtgtcaataaaaaaagttaaccaaatgatcgatgaacacctactatgtgccaggcacagtgctgggtgctggcaatgcagtggtgaatgagacagggacctgggtgcttgctctagggaatgcccttaggagaagctcagggtatgtttttttatttggaatgcttgctgattcccctcccaggacctccagaaagaagtggtggttgcttcagcggtcacttggtgatgactggcaggtatatacctgtgtagctggcacatctggtgcctgtgatcagagccgagccatccagtctgagctttgtttttcccagtgcagcagtggtttcctgcagtaagctccatcttggttgtgctgccctccccgctggggttgggataacagcctcctggggactgtggctaatctcaggagaagcagagaccccagggaaagactcctgtctccgttgtgtgcacctaggattagatagaactgccgctaatgcagttaggtaaaggcaagggccctggttgctggggaaccaggaagcacagggtgagcttcccatctgctctcagtgaaggacgtcctcactgtcaccgcttcctagggccaaaggggcctctgacaaagctaatgtgaccaaagtcaaaatatgggctccgagagtcagccaaacccattcaactaactgtgatcttaggcaaacctcaaagcttcggtttccccatctgtaaaaattggggtactaatcatatctacctcattaccttttggtgagggcaaaaatcagacaatgctgacggtcactggcatgtcctgagtgtgcatggtgagtcgtccatcaacaagagctcagatgaccatgttccaggtgaggaacccgaggcccaccctggccttgatcagaaataaccaccctgaattcctcagtgcctgagtctggcatcgaaactggcttccccggcctccagcactaggccacgaaggaaccagcttctttctctcactggtggtggcctgctgtgccctgctggctgggtccagagagacagaatgaggaggagctcaggacctgttatcagaggccagagggcggctctccagctagactgctagcaggaccgcagtgatggaatcacctgaaggtcttcttcaatttcctcatctgtaaaatgcagtggcttgactgccccttccagccctaaatttgttttaggaagcccactggaggaagcagcgagcaagaagggagcagcggagggaacatatcaatatgatgtaagaataatagctcccattttgtaagtcctgactgtatgcccgggactgtgctgggatacacagggtccagaacattatccattttctaggggctcacgcactcatgaaactggtgatagtggtggggtgcagtcgtttggggtgggtggagagacataataaccggaggaattagaatttgttttggtacatgccttaagagagatctgcacagtgacttgtggaccccagacgaggctgcctgtgtgtgcagagcctcgaatgccatgcagtgaagggaggttggaaccctgcatccagggaagcggactttgtggttgggagggcaggttcaggaaggttctggtgggagggttggcagccaggctggtgctccagagggctgatggattacattcttcgagttagaaatcatcagaagccccgctgagagggctcttgtggctttggagctatgccggaggttccctcttgcaaggggaaaaattggctgtgcctttaagtgttatcctcctgtcctcttggtttcctagtgtggcaagattcaaatccaaagtatttgcattgaatttgttaatttcaaccagtggtagaatagaataagaagtctaaacagccattttttcttcccttggagggtatgttttctgaccttttaaggaaaatcctgtcgaaaccttgaaaacttgtgactctaggtgctggatctgacactgggtcagggacatattgtggacctgccgtgtgcttgggcctgagctgagcaagctcatggagtaagctctcttgaactcttaagatcgtgaaaatacagttccaagccacagaagccctttggagtgattctgaatggtgggagggcagagaggctttgaatgctgtttgaacacttagactgctaagtactactcttcaaacacttcacgtgccttagatggtctagtgcaaaggatatgcaggaacataaaatatcttgccgctactggaatagccttatcttctgcctcaatattgatttagaacaatagcttgttttgaactttctccccataaattaaattttaatttagaaaatgccattaggggaaacttagtatgtaagtacagaaggttttggagatgggggtggctgctcagaagggagtctttagagatgacaaaggtaaaagcattactctaatcagaacatttcattaaaacccccatcagactaatctgtcgacacatagtattttgagtatcttttgttggcaacattctgtgctggaaactgggagagagagagtttagctcttgtcctgtatgtatgtgcatatttatatgtgtgtagtattgtcttatatgggaaaggacgatgggatttttttttttcagaaacatttttcccttctacaaaggatgacatcagggcatagcagaaagagctctggactgaaagtcaataaacttgagtttatctcctagccctacctctaactagctgtgtggccccacacaaaacacttgccttctctgatcctcaggttctcatctgcaaagcaataaggttggaccaagccctgtgtagtggcagtgtcaacatcacctgggagcttgttagaaatgcagagtctcaggctcctctccagaactactggatcagaagctgcattttaacatgatcccaggtgatttatatgcaaattaaagaaccatggctttaaagaaccattcctgctctagtaatgtattattttgtgtttttttccaaatgcatattaaaatatagttacgaagaatttatccaagactgcatcaaacattctacataaaatgggtgtatcatctcttaccctttaaaagtttgtactttgtgagaaaaaaggtttaaaggcagaaacaggcacaagcagtcgtacattcagttccagtgctagatatacatatttcttccttttgcctcctttgtgttttgggccttgacagtgtggtaagggcagcggtggagagaggagaggaggagttgcagagtcgaggtgactgaaggtggaaatggcaatgcaccgagccctgagctggcaggtggtccagagagcagcgggccccagcccagctcctcagtatcattgcaagggttttgagaatccaacatcatcggtgatgagaaaaatgtttcacatttttcaagcatatatgaaagtgctttgatgaattgaataacaattcatagtgattttttgatgttctatattttttctaattaattgattctagatgttaaacctattagatgggaagaggactctagttcatttttgcattaaaagggttctttcttacttgaagctggtgggaactattggaagagggcgtaataattaataatgatgacaataactaacacatgccgagaactttctaggtgccaggcactgtgccttgcaaaaaaggactttgggcatctgttaattaatttatggataaggaaaccaaggctcagagtggtgaagtgacttgctcccagtcatcctatgagtaattggtggatccaggctagaaacccagtgtcctggctgtggggccagctttttttctgctgtgcccgattttgtggtttgtctctctggtgctctggagtagcatgtgtgggaaggctgaacggagagtcatgaattttcccgagttcctcctctgggaatcacagactatcagagtccggaggactttcaaaagcatgcaggccacaaactccatttacaggtgaacacatccagcccagcaagggaagggaacttgctcaaggtcaaacaattagtagggtttatttgttctggtcttcctctacctgaaattcagctctatttgaacaagtgaaacaagcccttctatgaaagcaaatgaacacggttttgaatattgtatctcaggttgctgtgagggctatatatatctttaaaaaggattcagcatagccactggtagttgataaacactcaaatgatgtttgttatggttatcatttttactaagcttcacatattaaatttagggacacctttgttgttgttgttttaaagcaggactgattgtagtcttgtctttttttttttttttccatgttctctatcttcaggataacctttgagaggacagacgaccaaattccttttcactaaatactgcaccacataatcattggaagccatatactggcaagggagaaagttgcccttttgagaggctgcattcttcatcttatgagcccatgccatgccagccagctctcattgagctgagaagctatctttttggcagtaggtctcctgatcatgaagatttgaatggaacagacattttctgagactcagtcaggcatttttccactctgcatacaattgttaccaatctagagaagtaggaactggtttagaatcagagccagcttcataggtatgcaacctgtgcaactgcgcagaccatccacattggagccccctggttgatttgacgctctgcagggaaattggaattcttgatattattttcaataagacgccccacttttttattttgcactgggcccatcaacttaagtaggtactcttggttagaataatctagaacaggaccaagagcctgtgaggaacaagtcagtgggggttgcagtttttgggggaggaggaggaggccacagacctgactccttgtgatgggtcctagtattatacatgggcttgagccaggcagcatgcagtccgctgccatagagaggaggtaagcagggtggtttgttgtcttgtccacccatcactttgccttgtaagtatagacaagacactaactgctctgcatgtctcctttgtatccccagccctgatcacacatagtacccagcacatagtaatcacttaacacattgtggctatttactttattgctgctctaaagtagtccagagatgaaccattattccaggggctttacatgtattatctctagtttttctgacagcctttcaaggtagacatgatcgtcccttctttacagatgaggcaactgagactcagaaacgttaagcaaaagtatctctggttcatctctggactactttgaaaaaatagatgaagtgttgtgtgagatgcattataaactttcctatttttggtgtcagcaccatactttatatcttggctattcaggggcttaacgtcaatttccctgctagtaacctctttcttttattgattcaacagctggattaacttccccagcatcatcatttattagccacgtaatcttaaatacttttgcttaatgtttctgagtctcatttgcctcatctgtaaagaagagatgatcatgtctaccttaaaaggctgctaggaaaactagagataatacatgtaaagcccctggaataatagtgactggcacgtagtaggtgttcaagtcacttttcttattataaagttgacatacaaacagctttcattgtgtcatttcccttcctcaaaaatatcttcaatggctccccattgccatggccatggtggatcaaagctcatcatgatctagccatagcctacattgtctgacttctctcaccagtgtttaaaaacttctccaatgctagctgtgtcttgttccccaggccactggaacctccttggcgacagaattccatgttatcacttgagtgcctaggagcatgcctgtcatagtgtctgtatggctggttgctaatcacagtgtatttcaggaatattgtgcaattctgcttttttcccatttgtttatagctcttagttccttcaaattggaaatggattatggttttgcatttgactcaggaagaggaaaaaaaacacccatttttcctctcctgtttttttttttgtttttaaacagctagtgtcactcttttgggattatttgtttatatgtttgtctctgtctctggactgtgaggtctgggtgaggaggaatggtgtttaattctcatgtatatcttcagtgttcagcacattgagcctggcacaaatcaaagagacactcattaaatatttgtcaaactgatgaatattggaaagctcaagtttttatggcagacgagggagacagtgggagctgcctttttattggaaaaacattgtttattagatctgtatggatcatttagaaaatatgcagttggttatcttttatggtcaaagaagaaaatcagtataaaatgcttaattaaaagcaggagctaacatttcccctagtaacgaaggcaggcttgtgaatattttcctttccttagctcaggagatgggcaggcagccaggctcaaagatggggatgcttcatagacagatgagaaggtttgacttaggaggactgagtcccagggttaccctgggtccatttttgctttaatgtttctccgcatggatgttgaaaatgtgaatgaagagtgttaattccttaagatattctgatgacaatgtcaacccctttaaggtgattttgctgttacctataaaattatcacttgtttgtgaattgattataatggcatattttcaggagtatgttttgtacttttaatttgagattaaaagccctaagaagtgtgggtctttttcttattcttcttggtgctcctgtgcctgacacagagcaggcccttaaaagatgtgatacctggagttcttattcacttggcctcagcagagttggccctttcctgggtgtaggaaactgctgaggactaggagctggggaggcagaaaaggcaatgatgttctgaatgtttctgccactggaaggaaatcaggccctctgagacagacaatgattggatgtgctgcaggacaggaggtctgagtactggcagcatccacattacctgggagcttgctggaaatgcagaatctcagatgtgctccagacttactgaatcagacactgcagttcatcaagatcctcaggtaattcatctgcacattaacatctgagatgtgctgctctgatgagaaaaatctgggaacttcctcaaccttgagactcgatagtctggattttcgtaattctaggatgtagcatggtgaagtttgactgaccttgaatcccagagctgccactgtggggatattaattaacctttttaatctcagatgtttttcatctataaaaagtatatgttgggtattttgctaggttttttttttttggtgaggattaaatgaaataatataatgctcttggcatatagtaggaacttaataaatattacttattgctgattttgttattttatctgagccctggtgtagatggtttatttatttattatgataggagaaaattgctgtattattatgattacaatgttgtaattttgcattagttttatgtcatttatatgatttaatgagtattcttaaagaattaaaaagcatttgcatgcttttgacctcttgttttaacctgtttttgaatcttctactcataacatggacgtattatgtggctgtatttatgggtatcatgtttttggtcttttttttgagacagagtctcgctctgtcacccaggctggagagcagtggcatgatctcggcttactgcaacttctgtctcctgggtttaaacaattctcctgcctcagcctcctgagtagcttggattacaggcacccaccaccacacctggataatttttgtatttttagtaaagacggggtttcaccatgttggccaggctggtcttgaactcctgaccccaagtgatccgcccgcctcagcctcccaaagtgttgggattacagatgtgagccactgtgcctggccgggtatcatgtattttttaaacaccactgaatcacttatatttcattttggagatttcttcctcccatttattctgataataatgattaagtagcctttttatccagcactcattagacagttaatgaaaaaggttagttaaaatagggagtgaggaaatagtgaagaaatgaaattaactattttatctcactttaactgcctagctgtacattcatttaatcatgtagcttttcctttgagctgggtctgatgtttggagggtgctgtcttctttcacaaccacacctaacctgtaatacattttctgtggtatccagctttgttttctctaaagtggatagaagctgaaagacacaagtaaagcactgtaaatggggaattcttttagatacgtataatgcccccccatgtgtttatccttgtcttagagttaacacagtggtaattatttggttgggggaggggaggaggttatttttatttcactttccaaagaattgggcttaattttcacagaagcaacaactcgtcttatactcttgttttattaatttaaattctgtaaagtacacaatttccaaaaaattatatagctgaaactgtataacaagctttgggatcaaaccctactgaatcttgtcagaatagaactcaagaggtgggaatagtgcatggcttgtccaggagcatccacggagcatccttggacactaggtggggtgctctatagagggaatggagagccctgcccgatctagtgagttagttatgtggaggttggttaaaaaaacttctatatttgtttatttgcatgctactttacagttcttgaagtactttcaaattgattttctcatttaatttttacaatgctcatgaaataagcaaggcaagaatttagaggtgggaaaatggaggttcatagaagttgaattgtgtgactatgaataagtaatttccttgaaggtgcgttggaagcagagttcagatttttcagtcttaagccagatctctaccctctcttctcgattgcctcttttcttgctgttttgaaagcagtgatgagactttgattttatttagatatttataattttcttatagcattatgttaccatcatagggcatatcagtaatagtaacatactacatatgtcaatgttagacatttaatcacctctagcaacctacaagcaaataaagagacaaaactcctctggaccagcactgtccaataaaattataatttgagccacatatgtagtttgaaattttcctttgggcacattacaaaacaaaaaagaaacaaataaaattaattgtatattttctttaacccagtaaatccaaaatatcatcatttcaacatgcaatctttataaaaattcttcttgtgatattttgcactcttctttttgtactaagtctttcaaatcaggtgtgtaaattgctttacagcacagcttatctcagactagccatatttcaggtgctcacttgccacatatgttgaacaacacacctctgaactttaagaagaatattgtaacaaatgcaggcatgtgaacacttggagatacaagcctctaatactttggggccatttaatttcgagacaaatagttttacagatttcggtggctcctaataatgactccaaatcattaaaaataagattaaattatctacattgtatttaagagggccgagtatggtatgaaatatgtatttagaaaactctccatcaaatttttttttttttttgagatggactctcgctctgtcgcccaggctggagtgcagtggcgcaatatcggctcactgcaacctctgcctgctgggttcaagcaattctcctgcctcagtctcctgagtagctgggactacaaggcgtgtgccaccatgcccgcctaattcttaatatttttagtagagatggggtttcaccatgctggcgaggctggtcttaaactcctgacctcgtgatctacccgccttggcctcccaaaatgtggggattacaggcgtgagccaccgcgcccggcccaaaaatatttttaaaaaaggtttgacatataacccagccattgtactcctggacatttgtcccagagaaatgaaaacttatgtccacataaaagcctttacaggattgttcatggcagccttgcttgtaatagccaaaatctagaaacaaaccaaatgcccttcagtgggtgaatggttaaacaaactgtgctacatccataccgtggaatactacttcacaataaaaataaatgaactgtcgatgcactcaacaacttggatgggtccaaagggaattgtgctgagtgaacaaagactcagcaaaactcagtgaaaataatgttttactgggtaaaaaattatgagacattaaaaaaagtacccttttgagattatgctgagtaatctctaaaggttatatttatagaacattcccaaaataacaaaattgaagaaatagagaacagattaatggttgccagggttagggactcaggaggggggcgtcctgggagggggatggctgtggctgtgaaggaggatcatgaggcaactctgtggtggtggaacagtcctgtattgtaattgtaatggtggttacatgaacctatatgtgataaaattgcacagaacgcacacactcacacacaaacacacatgagtgcatgtcaaactggtccaatctgagtaaggcctatggatgtaccaatgctgatttcctgatttttctattgtattagtgttatagaagatgttaccagagggcaaaactggatgacgggtatgtgagacctctctgtgctatttttgtaacttcctctcaatctatacttatttcaaattaaataaaagcctggtgcttgaatagatgttctattatttgtaaagcctccttcctagaactctacagtgaagaaccccagtgaagatgtatgaatgaggatgagcgtggacatctgttcagggacccttttaattttattttatttttaccgttctttatttatttttaattatactttaagttctgggatacaagtgcagaacgtgtaggtttgttacataggtatacatgtgcagggctgctttttctacaagcttggggctgggcttatctcagtgcagaggggaatggttgtggcctagctgcaatctctcccctaaataagaagggaccccattcttgttccagtttcttgttaaggtcactgcagcagaggatgccatctctaggctcctgaatcagaatgtcccctgaggtgccattgggctgtttgaccccaccttgggaatgctagagcctgagatcttgtcacttgctcttcacattttcatattaatgtgtcactggctttcagcagttgcctctcagtaatgcatttagtccctggtgagtatttcatagccagatgaactttaatccctgaatgcgctgaaagggagggttccttttcctcttttgaagattctgctcccctgtaagaaaagtgcatgatttaattagtggatgaaagaaaagggcccaaatggagccaaaaaagagtcagcagcattgccacccacctgcagacacacaataggataaaagcagcacctgatcagggaggggaaggaacgaggagggagagggacaggcttggccgtgggtgtagcccggagttgggaagcccgtggcccaggatcaggtcagccactggctcagtgtgaccttggagctcagcctctgtgggatttgttttctcatccttttaaaatggagatggtagtatagatccttcctacctccagaaacatgtagacagcagaaagaagatgggggcaaatctatgaaagtataaaatgcactataaaaaagtataatgcagtttataaatgattgctcctaatgcatcaactggagtgaaactagccagagtgtaagagaggaaagaggggaagatgcagaactctgttcttgtatcttttttaaaaagcacaaaaaggtgatgtcttggtaaagagtagaagtttgacatgttttgtcgtgataagaatagaattactgtggtgactgtccatttatccacttgggatccgagcattccaaagtataagatgcttcattacaggccgggtacagtggctcatgcctgtaagcccagccactttggaaggtggaagcaggaggatcttttaaggacaggagttcatgaccagcctgggcaacatagcaagatcctgtctctataaaatatatttaaaaaattagcctggtgcagtggaatgcacctgtagtcccaaatactaggaaggctgaggtgggaagactgcttgagcccaggagttcaaggctgcagcccaatatgattgcatgactgcactcaaggctgggcaacaaagcgagacgctgtctcaaaaaataaataaaaatgctccttggctgtataagacatattttattgcccttttggagatttataatgagcacattaaagttttggaaaaatcctgcaacaaagaaatccgttttactttgtttagttcagtaactccttagtttattatccatggacccctctcctgtgccctgtgacttcctcctaacttgttacatagcctggtcaagtgcgctggaacaagggtactgctctgcagaattctgaactgagttcctggggttttgttgttagcttgtttgtgactgtcagactatttttttttttttttttttgagatggagtctcgctctgtcgcccaggctggagtgcagtggcacaatcccagcccactgcaagctccacctcccaggttcacgccactctcctgccacagcctcctgagtagctgggactacaggtgcccgccaccacgccctgctaattgtttgtatttttagtagagacggagtttcactgcgttagccaggatggtctcgatctcctgaccttgtgatccgcccgccctggcctcccaaagtgctgggattacaggcgtgagccaccgcgcctggcccagactatttaatttttgtaaataatttagtgttttgtttttgtttttgttttggcctcaaggaaactcaaggaaaatttgtacctcatggttagtttccattttagaatactgtgacctttgtatctttgtattgtttttcaagttttctttccttgtcttgacagattcacaggccctgacttaaaaattcttgttactgtattgcttgttgtatcataagccatttcagaatctgcctggattgagatgggctatgaatataattaagaaacaaaaacaaactaataaaattacaataacaactcttttttgagggcctgtcatttttcaggcatggtactgggttctttgcataaatgatttcttccttaatgtgatcaaggtgttcctcagttttgtcctaggaggttttagatctcacggttctaatttagtttctcagagtcttacaactgggagggacttttgagagcatctgaccctaagaaataacctccagggagatgaaagtctaaaccagccaggacagatggtcttctgagactctccatggcaacctgcagctaatctctgcccttctgccacttctgggaaaattgctttacggaaatgctgttttaactgggagcatgaaatcactaatgatgggcaaggtgggggtggctggtttgtgtttgggaaattaaggttcagtgcctgtctctctggggggagcagctgctgtgagccaggattacctaggacagtttctgtctgatgagagaaggggacaatgccttcctccactcaggtgggtgaaggaggactctcacatgtgctgagtttgtgctagcatcagtcttttcattgccctgccttcacataccccagcatctcatctaagatgtgtcctgctgacatgagccaagtaatgtcattcttcctcatccagagccatttctggctgtcccaggctttagagcgatttccctcacttggcataggtctttgcaatattttgttatatcatctttccatgtgtaagccccatcttgtctccttgtgtagactgggcactcctgaaggcagggatgatgccctacgcatggttgtttctcaagttactgttcagtaccaggtgcatattggtcctggggtggggatatttattgttgctgctggttggcatcagtatttggtaaatagagtggagggatctgtgctggtctctggagatacaaagatgcgtggacacttttcagttcatagtaataactgagtttcttgaggggagggactgaaatttattcatgtctctccaacactgtacctggcatattgaactgtggcagaggctgctacttgttcttcccaatattattattattagtggtagttgtagtaatagtattaatagtagttttccctctccttctctctttcttcctcttcctccaactcctactctccttctctttcttcctcttcttcctcctcctccaatagtaataggaactttacctgggcacgtttgccagctttccttgcagctgaatatggtcatgtgaggttctggtgaaagagacataaacagaggtgataattgtaacttccaacttgtgctttaaaaggaaagcagtgggccatctcctttttctccttctgttgggctggagcacagctctatctttgaccatatgaataaaggtcacacttttgggatggcagagcaacaaagtggaaggagcctgggtcctcatccttgctgagctgttgccatgaccctagactgaataactgaactgtttttatttgtaaagtaacatttacatgagagacaaatatacttctatcttgtttaaacttttctacctttgggtacaaaaggcacttattatagctgcctagtctgtattctgatcaattcaggaggtattgataaatgtctgttaaatggatgaatgaatttctgccttcccttattattgagcagctttaatagtggtcagcgcatacatttaaattgagaaaggaggtttcccaggtgactttcaccgtatttcattggccagaaatgtgtcatgtgggtctctctggctgcaaggaggctgtggatgtgagttttattttccagtcactgtagatgaagaaggcagaaaaggggtaggaaaaaggaggaatgagtgaaccaatctatagtacctatcagcagtcacatataagaaaattagttttcatttatgtttttttttttttaaagaatataagccacctaatttgagtattgccaagaagagatgtacttcttatcctagttgaaccagattttgggaagacaagatgttttcaaaagagtagataattatcagcgtggaccttggggctagatgtagtcatcttgtcacacaacttgattcatggccatttggaactgtctacaatgggatggatgttgatgctgaggccacctggtgcttcagtgtcttaaatgctttctttggggccacagccaattccaggcaaggcatggcaatcccatagtttgtaggtgatatggaaaaggtagtgtcagggcagtcagaaaccctcagcaaatacttaagtacttctgtgcaccagcaatgctaggtaccagggaatcccataaatgatctctctgccatcaagagggagatgaagagataaactgatgagtcccccacagggtaatgaatgccatatagaatgtctgtgaagagtattgggaacaaagcgggagaacaagacagaaagtttccctggaagagcaataggaggtacctggagcctctatatttaatttctaaagagattctaaaacagtgggtctgaaatatatagtctgcttccaaattgggtttaaattagcatcttgtgtatcatatatacattgtacttgttactctggggaatggagagtttcaaagaagtctagagttgaagcattgtccttttctctgtctaggggagacgcttaagcaaacgtgaatgtacttccaatgtggcatctaagcagagagaccatggaaaggccaagttttaagaattgagtgtttctcctttcgattaaagaaagaaagttgctcatgaatatatgtcacttcaggcaaggggcatgggatcctgaaaatatctgtgtcagaaaatctttgcaaacaaaaatcctcttccacacctttccaaagtcaagaatacgttggacatttaacattttaggttttggattttcttaaagcaaggcacacaagaagatcaaagaaggtgcattgacatgttggcaaagaagaagcatgaaattcaattctgtggaactcattttaccagagaaatttcataaaacaaagtaaacttatcagtggtttaagttgccaacccttggattccaatgcaacaagcaggatggatgcaggcagcttgcccaggttcaatggagtttaaaggccaggtgtttgtgtaggggaaggaaaaacattgtcctgctcaggaaaaatgtattcaaataagaaacgagaaacccattttgagaatttagtgcatatgttcattttacaggtgtgttgggaaattatcggcaaatgaatggatttggtcacaaagcctttgggttgatttgggggaggaatgttgcttcttgggaaacagccagaggaggcaaaagatatttttgggaacattctaaggcattctctttcctcttttttgttgatggcttccaagttgtctagccctgaatctcttatgtgcattggggaattacatagcggtagaaggcacgcatcatttctttacttaactatgtgtccagaaccattgttgagttctggagatgaacagacacacttcagcctttaatgaactgctaggcaggagggggaaacacacatgtaatctaaataatgtaatgtaatgccataagtggtgtaaaggcttgtggttttggagaagaggaacagatgaactgtccagaggacattagagaagccttcacagaaaagattatatttgagctggatactgaaggatcttgaaggtgattgccaggaagaagggaggaaagggcagaccagatggaggtatccacgtatgcaaaggcatggaggtgtgaaacatgatgcctctaggggatgtctcatttagctggaacacgggttttgggaggcccatggaggctattttgggaaataatactggattgcaaatggcctgatatgcttgctagtctacaaatctaaacttaatcttttaagaagtaaataacttctctgtaggaaagtaactacaaacggtaaagaaagacatgcttgtcaaaaaggccagaactcctgaatgtggaccccaggaactcacatgtactatctggtctcccccaggttctgcaaggacatcaaagacctgaattttgcctagaaactgaccctaagagagacaggaagtagtgagaggatacagacccaaccgactgtagaaaactgtgggattgaggttaatatataatttgctttaacttgggtgaatgtggaataaggagagtggcaaaatgttaagttcatactcatctgtttataattgtgtgctctgagcaccctttcctttaaagtgggctgcacacacagagaaagaaacatttttcacacagtttggaccagtgcctgaaaagctcagactcggagcgtccaggagctgagatgcctgtgctggacagcccctgattggagaggagttaatgatcagtgcccctaaaattgtcacataggcagctgattatgagaaattggtccagctgtttaggttacttttgagatcaaaattttgtgttttgtcaggggagtgagttgtcacaaaccccatgtggccaaggagagactactagcctgcccttgtgccaaaatgttgcaagcttctgtgggcagctgattttagtagaccttatagggaaacccctcactccatcttttttttcccctccttcctacactgagatgtagcaggaaggaccctggcctttgggactggaggtgtggttagctggaagtaagtaaggttctgctagttccctggtgaacatagaatggtacttctttctgtctcctcatctgtgaggtaaaaacattcagagactcagtgtttcttatgacattgataagctaaggttccactcccctttctggcctgttttgagttttccctgtatactcagtgagtgcatatgatttagaaaggtctgggtggctcaggcagtgggtgtgagaagagctgcctcactttgggctctatgtccttaggtccaggttgggatcaagtccaataagctaaagaaggctttcgggaaataaaaccagaggtgttttttttttttttttttgagacagagtctcgccctgtctcccaggctgcagtgcaatggtgtgatctcagctcactgcaaccgccacctcccgggttcaagcaattctcctgcctcagcctctccagtagttgggattataggtgtgtgccgccacgcctggctaattttttgtatctttagtagagacaggatttcaccacgttggccaggctggtctcgaactcctgacctagtgatctgtccgcctcagcttcccaaagtgctggagttcgctaaccaaggcctgcaggccaaatttggcctgaggcctgtttttataaataaagttttgttggaacacattcacccacatgcatttacatatcatctgtgattgcttccatgctaccatgtcagagttgagtggttgtaacagagaccatgtgggctgcaaaggtgaaaatatttactagctagccctttacagaagaattttgctaactaacctgtcctagatcataaactctaggagggctggggacattgaaggtagtcagtaagttttgactgaatgaatgaatgaatgaatggatgaatgaatgaatggtcaggaaattggaatttgttggatatgtaatttgacagcagacttttaatgacacacttcaggttccattttccctttaaataaaataagaacagtgctacctatgaaacaggcagtacttaggaggattatttcccataatataactttgggtgtttaaaatgctattaaaaatataactaccatctatgaagctttgtatgtgttgagcactttattaagagctttatttttattacctcttttagtcctcaccgccacccactgtgagggaggaattattgatcctagtttatagatgacagagctgagtccagagaggctgagttacttgctgaggtcacagagctggtaaggcattgagcacagggtccaactccagggtgtctggttctaaaggcttcccatcatgccccattgcttctgagtgctgttaggtgcttcccaccacttttttaaataaaagagacagatatcaattttggagaggggtcttcaagatagaaacaaatggcaaaaaaaaaaaaagttggttatcaaatcttttaaaccatttatgtgatttagaaaactgtgaagttactcatcattagaagtgcactttaaaaaattctcttccttaaggttcagctcagtgtgcttcatggaaaaaactaaatgggggagcatgttttctttgggaaaaacaaaataggtaagttttagggatttgtagaattttcatttgtttagcaatggtgtacgtagtggtaatacacattcaaatgctgccttctcccagaaaccttctgccaattccgcacatcacttggaactgggtacctagcacatagcagacattcaataaatattgattgaatgaatgaattagtaccttctagcatttcacacatattgccttccagtatacttggttttatgtgaatgtgtgcccttacctattatagcataagcactagaagagcactggtaccctgcccacttctttgtaccccttatggtacctacctagcacagggctggaactgagtagatgctcaatgaacatttgtggaattatgctgtggcccccaaattattttgtggcccctaaagctttgcagctgagtgaatggcccattgaaaactagcacgatgatcagatggacttctctctgtctaagggcattgattgagacccacatttatattgagggtggaaatgtccaacaaagacaaagaaaagcatatttattgctttagatagaagtcatatttgtttctttcactctggaagatatagtcacataaggtcatgagctattttttcttcctacttaattgctagtctgtgggttggtgaaagctcacatgcttagcttttcagtgaaactttcacagtccatgtggctctgactcagaattttttcccctatctgcttcttctgttgccaattcattgtttatctcctttgtgttttacatctgacctattattttgcatgctgttttggattactgaggtagcaacatccaaatagtttctgtgtacattttagcttttgggagtcaggcagctgctctggggcctgtttgagtcaggtcagggtcagaaatgcccttctgcttttgtttccgtggaagaagttggcctggaactctctctgggcaccttctgcgccctctggcaaccagaaaagcaaagtcgttcatcaaaatctcagactggagcaactccttaaaacagcttccacagttcttgcacatactcctttcttgatttgttgcatatcatttcaggcacctcttttaatgcagctattcaggctgcctaaggcagtggtccccaacctttttagcaccagggaccagttttgtggaagatagttcttccaccgatggggtgggggtggtggtttggagatgattcaagcacattacatttattgtgcactttatttctgttattattatattgtaatatataatgaaataattatataactcacaataatgtagaatcagtgggagccctgagcttgttttcctgcaactagatggtcccatctgggggtgatgggagacagtgccagatcatcaggcattagactctcataaggagcacgcaacttagatacctcgcatatgcagttcacaacagggttcgctcctatgagaatctaatgccaccactgatctgacaggaggtggagctcaggcggtaatgcaagtgagggggagcagctgtaaatacagatgaagcttcgctcacttgcccacagctctcctcctgctgtgcagccaggttcctaacaggccatggaccagtaggagaccctggcctaagggaccaggacagtggccagtgcttttcatagcctcttagtacttctggtggagtgtctctattcccctcaattccctcctattccgctaggagtttgaatctgctttgcccagttctgtcctgccagcctttttcctttcactgaattgccttcactttttgcctattagctttgatctctttggaaaaaagggcactggggtattattactgcctctgtttgtttttgcaaatgcactatgatttgtggttggtcttttggctagcctgaggctacctgaccctccctcaacagccctagttcccccaggtcattctatagttttgcccatttctttaattaatgttggtgagagtctccgagcaatgaagactttttggatatggagagaagcagaaccagagggataccagtaattatgctaatctgagagcattaagtcttcaaatatacatttttggataagcaattctgttgtttttgaagtttggttgtctttttgtttctgggtggtggactataattttgtattaaggaaagaatgcctgcccttatatatccaggactggattttttttttctttttcttttcttttcttttctttttcttttttttttttttttgagtactcatgaaaggaaaccataagaatgtttgggtctaataatatacttgcttgtgtatgaagataaaaccaataataacattaataccacccttcagtggtgaaatgctttaacctttcaaaacaactccttttatgaacttactctatcagttggcaaggtgatttcagggctatctcctgtggtgatgatggatctgtgggagcttttctaattgtgtgggtgaatttgagagaccccatcccagtggttcttgttcaggggtgagtatggaatcatgtggggaaccgccatgaattacacatacccaggtcctgcccaggacctactgacacagtcctggggtgggggacctgcccacttggaaaacttcctgggacttcctcagctggaccctctggggattggggaaatgcattgcagtcacctgcctggggtagtaggggctgccacatctgtgactaggacccaaggagagtgatgatgacccttcttggaatcatgcagaacacacagtgacagtcccttttggaagctggccacaggctgcactttattcattattttaacagcaaccaaacatttgctgtgtgcccactggtggccgctagacagtcttcccaccctttagctcatgtagtcatttaaaccagttccatcactagagaaatgtgttactagccccttgaaggagagtgggccttcaactggattcaggagttgtggtctgaggagagtgattgatatggtttggctctgtgtccccacccaaatctcatgtagtagctcccataactcccacgtgttgtgggagagacccagtgggagataattgaatcataggagcaggtctttcccatgctgttctcatgacagtgagtaagtctcatgaaacgtgatggttttaaaaatgggagtttccctgcacaagctctttctctctttgcctgctgccatccatgtaagatgtgacttgctcctctttgccttctgccataattgtgaggcctccccagccatttggcattgtaagtccattaaacctctttttcttcccagtctcgggtgtgtctttatcagcagcatgaaaatggactaatagagtgatttaatgagtttcaccagcatgggtttctttagcctcggtttctttgtctgcagtatatgggctaatggtacacaccttgaggttgttgagggagaagagacgggctcaagtgctgcctttgtcttaccaaccttgtgaagcctccttgagcagccatgtcttcatttgtaagatgagaataagagcacctgttttatgggctttttgtaaggattgcgtgtgctcatgtaagaaaaaccccttgcaccctgcatagtaccttgcagagcaaatggtggtgataatgacaatagaaggagctctctttattgagtgcttactgtgtgccaggcactgtgctgggcactggactacaacagaggggaaagataggcatcgttcctgacctcactgcgcttaacaaagagaaagctctaagagaaagttttcaaagcattacccttctctgtatatttaagaggaaagctttaatgttataggatgccttctaaatatgtattttataacacagtgggtagaatgtggaatgtgtcttctgggagggaactggagttttgcatttcctgcctgcttgtgcttttgaatttgtggctgtaatgctgccctgcctgaggtttcagcagttaatatttcccagggcagcatgatgtcaacgccccgtggtctcttatctacaagaagggtatagccggggcagagggagagaaaggactattttcaaagcctctcttgaagactttgttgagctttaacttaaaattttcctcatctccttcctcaaacgtttgtgcttgatgtgcataaaccatgccagtgttttggaagattcaagtttgaccaccataaattggttcatatttccagcagggcagttatttaatttcctgttggaagtctacaaaatgttggcactgtttgctctttggcagaagaccaaaactcagtacagtatcattagcatgctctggtacatagattaaagcacgattgtctttaataagaggccatccctgtttaggatggggctttgggggctgcaagggtgcagggaagcacaacgagctttctaatcaaaatcaaagtgcagttactgggactcactcgagaagggttaaagggagggcagaattccgatttcttgtctcaatttcatttgtttgggttattttgctctagactctgggagagttttggaggccagggctggctggtttgtgggataccctggtttaagcctcgtgcttcttctgcattcctccctcttggcagtacggctcatgggagaagcccacctctgaagcccatagagaaatgcagagtgtctctacggaacccactgtagtaactgaaatgttataatggtgggcatttacagaggctctgttatcagtgaggcactttacatatgcatattcagcctttacagtaaccctgtgagatacgtattattattgctgttttgaggatgagaatactgagatgcaaaaagattaaagtatctgtagccagtgagtatctgagctggggttagaacccagttctgttccttggaaagattcttactcttctcatataccctaataagggcctggggaaggaaaggatctgagttttcaaaaaagcttgaaaatttgcctaacatgaatcttgggaaattatttctaggggcttcttaccagattagctctgtttttctttcgcagaggcccttcagtgttggctctttggtagaatgagcatagaaatgtatttttttcctacaaatattgtatcatgaaaaatgtcagacagattgaaaagttgaacaccacctacattctactattgctgttttattctatttactttatcacttgtttctccatctaacctctaagatctatttatatttgttagaacatcttttctctctgcccttctgttcctttgattgatggcaatggcctgatgggaagtaattcacaaaaccagagggaaagtacagtgcttagaacaatcttttttttaggaaaaagagaaaattgttcttatgtttaggtagagcccaaaatgggcatttttcccctcccctaggtctgttgtttaaaggatctgacagaaataattataatgaggctgatggtgaatacataaggtataacctattattactgtcttctatgcaccaggcatgatgctgactgcttagtaaccttatctcattgatcatttcaacattcctaatttacagatgagcaaacagcctagagaggttgatttctgagctgggatttgagactggtgtgtagagactatggtgtgatttctctgcatttcaaattatgcttccctatatttttgttccagggtctcagtgggaggccctagaaggttactactaataaggaaaaattgctaaagccctggaaattgaaggctaccagaaccttgtaaagattctctgggactagacctcattcctctgaggatccttgtcagacagtttccagggggtggggagatgttctgctctccccagagtgtcatagaaagtttctgtggctttcggaatttctcatgactgattcacatcttcttctccagcttagaagaaaatccaaacacttacctttggtttatcagttggttaatgttgttttcttttcatggtaggatcatctatggcctccttagacctatacaagtgacatcttttcttcctggggaagaagatggtttctgcaggcactgacttatgagggcaggtgcataccttttgtaagggatgaaacttgaaaaagaatgggtgctttttgatgtgtttatgcttgaacctgcttccttgttgagtgtgatcttgagcaagtcacataagcttcttaaactcttggcatccctgcagcagttattattgtgagggagatggaaaaaaggtatggatagagttctttccattagaaaatgtaatattcctcaggagcccatgaagaggatgctgctgaaaactgaggacatggcatagataggaattgctagagaaaggcagtagagagaagaaaaatacctgttggttgaaatagttgattggaggaataaaaattgcctggaacttaaagtttccttcgaataccagcactgtccatcagtagctgtataaattagcctctttggtcattaagtttcatcataaagtgggattattaatacctacatcatagtcttattgtaaggataaagtttacataatgtatgtaaatctcctaacagtagttcatagtacttggcgataaaagatatctcttagaagtaggaaatggggaaactgaggtacaccttgaaacctgagtaggatttggatgcgtaaaatggtccagttctgaaagtattttacaaatatcaccatggaacactatgcaggcatcaagaagcatggttgaaacccaaaactcttctttcttttaataaggcaaaggtggttaactttttgagccaaaagttccaaattgttcagtaaaatgtcattgataagatatcaaaatatcagatatcattttggttgaagctcaagttggcaagaaccaagggtggaattgctaagctgggtgacacatttgaagccattgtaatgttttagtgatctccacagggcacgtcattggtggctctccctgtccccctgcaagccctgcaatctggctgcattttctacacacttgtttggttgtttcatgaaatctacccccctgtactgctgcaggccacaaagaacagtgttcagtaaggtggattttggaaactgaagttgtgattgcactgtagaaggctttcattgtttgttttgttttgcttttagtttatggaggactgttgggagattaggagaaggaaaatgccccagtagaactgaaatcctagtctagcacctgaaaagagtgaattttgccttcttttttttctctgctaccttgcagtcatttctgctatatgcagattcaggtttgatgtgaattttgagtttagctggaattagttctttcatggccttggggaagatgtggataaaagaatgaacatactaagggttgacagtaaaattcaaaggtcaggtaaggttctgtatgcatcctctgcctggagtggttgtgtagtgatagtgttaggactttataagtctttttctcacatcatccttataacaagccttagagataagtattgtttttattgctattgtgcagatggagaaacagatgaggaatggagaagttcaataacctgtgtgaggtggtacagctaggaagtggcagagatgggacttgaattcaaatctctgacatgtaagcccttccagcaattgtggtggaatatgctatctctgttacaggcttctcttgtaacaagctgtgcttgttaatgctctataaggagcctctgggagcaaggaaaagggaaagattttttgtgttcactttgcatccacacagccctttttattctcaagattatgctggggggaggaagcactagaactaccgtgaattaagtgttcacattgtacctagattaaagcaaggtgctctgcataattctcacatttaaccatgctgtccttatccttatttcattgatgagcttcagaaagtcaggttccttgaccccagtttcacccacagaggaagttctgatggtgaaatttgaacacagaatgagtccaccaccttgccttcctcttcggttttcaatgacttctccctgacagtcctgcgatggcatttgtggttttaatttcaaagacccttacaattgttgatggttgatagcatttggtatccattggaaactgccaacacttttcactgctgcatttggaagaaaatcatagtgagttgatgtgttagtgattcaggacttctgggaaactgagagcacccgtgtgtacttatttggagtcaatactttatgaacaactttggcccaaaaggagaaaaatctgtcttctgaaattgagtgcaggtctcttagtggcttacctcagcagggagccagttattacataagctgaataccaggtccgtgggtttccctaacctgaaaaagaagcagcgtttgcagttatgaggaaaacagaaagacccatttctctgtggcatgatactgaacaggcagcttcagccgtgaggatattttggccggaggaaaatgtagcttaagaaaagtcccagctggttcaagtgacttaagcccagctattcatgaaatattatctgacagctcccccttctcctcaagtggctggggagtgagtcacaattgccccagaaacctgtgttctcatatgggattttggtattccaggtttgctctactttgcacactggacagcttcatgaaaagccatatttggtgcagacattttcttgtgatgataaaagcatttagtaaatgtactgggaagcttgccgtgatgaatccttttgttaagaaattaaccaacattaattttgaatgtaggactgtcccacgtgcccagcactgtgcttgctgatgtgggggttcagagattatgagacatgtgaaacactagaatggaatctccatgaaggcagcgatttgcctattttgttttctgatgaaactgtggtatatgtaacagtgtctggcacatagtggatgcgaaatagatatttgttgaacaagtgagtatgtctctgcccataacagcttacaacctagtttgcttgcattaattaatcaactaattattaattaatgaatgattttattcctttattctacttatatgagcatccagaagtcctcaattttattaggatatctttaattctttttattatttaaaaaggtaaacatgtgatgtgtttgttgtagaaaatgagaaaagagcaaagatgtaaaaagaaaaataattgagacaataattattttaatttaagcttatatcattagaaactttttccatgtaaatacctgattttaaaaaatgagtttaattctcttgcaagttgattttataacttgctttcctcccacttatcagtgttattgtgaacagctttccatatcaaaatacactgttctcaaatcatcaatttttaatcacacaatttagcattgtgtgtgattgcatcatagttttcttaatccctattgttgaattgttgggcattactcctctctctgtttcattagtataaacaatgctatgattatctgttaatttttgtgcatatccatgattattttcttggcaataaccctttgaagtggaattattgagtcaaaggtaaaagtcttttgatctacacaatcattgtggctaccataaaggttacagaaatgtattcccctctctgtgttctgtggaaataaagtggtttttttgtttacacataactgatgccatgtattgtcatttaaaaaaaaaacaactttctgggttaaaaaagggaatattattgttatttaagttaatatacttttgattactggtgatgttaaaaatcttttaaaatattttttgtcatttgtatttcttcttttgcaagttactggtttatatccattttcttactcagagactcgaggacagatcttctttccttggtccctcccaatccatgatgggacttgctatggaatttgtccacagttagccccagtaaatgttgaatcctcccatccacccactcattcatctacccactcacccatccatccatcgatttatatgttgattcattcaatgagtatggaggacctaatagatacaaggtttataatttaagatagcgctttgaaagtttttttgatattgctgctaactacagacattacttttttttttttttttttttttgagatagggtctcactctgccatccaggctggattgcagtggtgctatcatagctcgttgtaacctcagacttctgggcccaagtgatcttcctgcctcagcttcctgagtatctgggactaggagtccgtgccaccacacccagctaattgttttattttttgtggagataagggggtcttgctatgttgcacaggctggtcctgaactcctggcttcaaggaattctctcacctcagcctcccaaagtgttggaattacaggcatgagcccccacacccagtcaaaatcttaaacttttttttttttttgagacgaagtctcgatctgtcgcccagggtgcaatcccggcttactgcaacctctgcctcccgggttcaagccattctcctgtctcagcctctctagtagctgagattacaggcatgagccaccactcctggttcatttttgtatttttagtagagatggggtttcaccatgttggccaggctggtcttgaactcctgacctcaggtgatccacccacctcggcctcccaaagtattggaattacaggcgtgagctaccgtgcccagccccaaatcttaccttttaagaaaagacatattaatatgaattaatacaatgagcaactaatccaaaaagttttttttctcctaatgagttttcctttgggtaatggaactgatcttgtcttttctgtgcacccagcagggttgggtagacagaaatcaacaaatgttttctgtaaaagtctggatagtaaagatttcaggctttgcaggccatatagactctgttgcaactattccactctgctctaaaagcaggaaagcagccatagataatttgtaaacaaatgagcatggctttgttccaatgaaaatttatatatagaaataaaatttaaatttcatacagctttcatttgtcacaaaatattatttgtctttttttttcccccagtcacttaaaaatttaaaaaccattcttaagtttgtaggccatacaaaaatagacagtgagctggatttggcctggggtttgcagtttgctgatccctggggtagggtctcagaagcatgctttgaggctttgaggagctaatctggttttgcaaatttgctacaaacaaccccacaatggatgattcataaatgaataatagaattgagtttagctgaggcttggatatgtatcctacctcttaatgactggcaatacataattcttagtgtgttagcaatattttaagcttctaaaaatacttttattatatatttactcataaaaattttacagttatgagcaaagaaaaaacgctttcctatcctttgtcaatattttgatgtgtcttttttcagtcttcatgtatatatagggcttacgtatgtataatgtctttctttacaaacactgttgaatcctgctttatttctcttaataatatatggtaaatatttgtcagtgttgttgaatattcaaatataaactgaaaccacaataaaataccactacatacccacagaatggctatgattaaaaaaacaactaacaataccaagcattggtaaggatgtagagaaactgaaatcctcatccatttctggtaggaatctaaaatggtgcagccactttggacaacaatttggcagtttctttaaaaattaaacttagcatatgacccaggagctccagtcctaggtatttatccaaaagaaatgaaaacacatgcccacacaacgataggtatgcagatattcaaagcagcattatttataatagccaaaaattagaaacaacctaaatgttcatcaactggtgaatggataaacaaaatgtggtatatctatacaatagaatactatttagtaattaaaaggagcaaaataaagagaggctaccacatggataaacctcaaaaacattatgctaagtgaaagaagttaagcacaaaagaccacatattgtgtgattgcatgtacattacatttctagaaaaggcaaaaaactagagacagaaagcagatcagtgtttgcctcaggcaaggtgggaatggttagcgtcacttctaggagcagcagaacttttggggatgacggaaatgttttaaaagtcgaatgtggtgattgcacgactgtatatatttactaaaattattgaactgtacactaaatgggtgaatgttatgtgaattatacctaaatataactggtaaaaatattctttgaaagctgaatttttaatagtgtcatattattccatcatgtgaatgttttatttctttatcctggatgacttgggagaaatattcagtgtttatttccttttacgccaaaatccatattcagtaggttcaatttgagccattggacttaaacaagaatgattcagaggaatgaatcccaatccagttgtcaagaaacctagcgtggtctcaatcctgcctccagctgggtggacctcagttccctcatctataagatctaggacagaaataaatacaaggaaatactgggttccagggaatagaggattagaaatagaaaacatagtagtggcagtaatgaataagactgatttccctaaaagtaggaggccaggcactgattatttttatttttattttttagcttttaagttcaggggtacatgcacaggtttgttacctaggtaaacttgtgtcatgggggtttgttgtacagattatttcatcacctgggtattaagcctaggactcattagttatttttcccgatgctctccttcctcccaccctccaccttcctatatgccctagtgtgttgttcccctctatgtgtttatgtgttcacatcatttagctcccacttacaagtgaggacatgttatatttggttttctattcctgagttagttggctaaggataatggcctccagctccatccatgtacttgcaaaggacatgatctcattcttttttagggctgcatagtattccatggtgtatacataccacattttctttatctagtctatcattgatgggtatttgtgttgattccatgtctttgctattgtggatagtgttgcaatgaatatatgcatgcctgtgtctttataatagaatgatttctattcctttgggtacatacccagtagtgggattgctggattgaatggtatttccatttttaggtctttgaggagtcaccacactgtgattcacaatggttgaactaatttacactcccaccaatggtacattgtggagaaaaaggaatgctttctccacaacctcacaatggtacattgtggagaaaaagcattcctttttctccacaacctcaccagcatcagttattttttgactttttagtaatagccattctgactggtgtgagatggtatctcactgtggttttgacttgcatttttctaatgatcagtgatgttgaactttttttcacacatttattggccacatgatagactggataaaaaaaatttggtacgtatacaccatggaacactgtgcagccataacaaggaatgagatcatgtcctttgcagggacatggatggtgctggaagccgttatcctttttttcataatggttgctggctgcatgtatgtcttttgagaagtgtctgttcatggcctttgtccactttttaatggggttgttgtttttttcttgtaaatttaagtttcttatagatgctggatattagacctttgctgggtgcatagtttgtgaaaattttctcccattctgtaggtagtctgtttactctgtcgtagtttcttttgctgcagagaagctctttagtttaattagaccccatttgtcaatttttgctttgttgcaattgcttttggtgcctttgtcatgaaacctttgcctacaggtgctgtttatttacacccctgtcccaacctcaccccactccctttcttttgctggtgggaagtcagtaagaactgtgggtggggttctgaggtaatcaatacaaagaagaaggtaagaaattggaggggactcaggggagatggcaatgctgacaaggggttggatggaatttgttctgtaaactggaagcattctgcttggcctcaacacttgccaaggcgttgatgacacacaatttggatgatttaatcaccaggaaactatctaggtttcttgttctgaagtatgagaggacagcctattaaaggaagaccgaggctggatattgccatgaaaatagtaagttttcacgtttggcttccgaggggagagctggtgccctactcactgcagggaaatttaaactgggtgaaactgaactggtttccaattgcttgtgttctccatttccagccaagttccaggttttcctagagtacagccaggagcatctgcacctagagaacacagaataaaattgtggaaaccaaacttgtaaatgtttttctcattagcttcaggctcccagccaccaataaactgtaggctttaaaaaatcctgtattattttgcaagttaagagaatgtgcatattccccttatttatatgttcaggattttcttaaaatgttacacatcaagcatttatctgctaagccaccccaaaaggtaacagcattctagtttttgtacaaaagagaaaaaaaattccacttaataaacttgcagtaacttgagcctgttggtggtcttggaggaaacccaaatccaggtttggttgatactgtgtaatgtgaatgcaattagtagcggtttttctaaagtagaaagagatgtagaaaaataatgcatagcaaatttaggtcagagctgggaagcttataaatccttatttttgttttcattactttaagtaatagggcttttgtctttattatgtaatttccctagcaataatatgttttaaaacatttttctgttaatttcatacatttgatcagaaagccacagttcataaacccctgtgatgtggcagctgtcactgtttatatatagaggatgacttcttgttcatccctgggaggccaacacaaaaattactgatgggggcaactttcactacctgttttttcatttagtagaaggtttgcaaagcagttttcagttgatcaacatcctcctgataggctaaggagtgaactgacctttacatgcatggtttatttcagagcatgttatttgattccagcatatttaaacctaagcaactagattgtaaggtctgtaaaaacagaatttgtctttctggttttttactctattcccctggcacatagtaggtgttcaggaaatattagctactattctcctctccaagatgcagctgttcctctccagctgtcctgtccttgctgctcctccttgaacttgccaggctactcctgcttcagcactttggagaccacagaccagcagggatcactccctctcctcttctgggtctttgttcagattataccatctcagtgaggccctaactatctccttcctttctttctttatttttccatcatatcatcgccatctgataaactgatatattgatgtactgatatattgacttatttatttgggaatgtgagctccaccaggacaggtgtttctgtctgatttggttattgctgtatacctagtgcctagaacatagttgctataatttacttggatgttccgccacgtactggctgtgtggtaatagctaatgcatttgctcccttggatcctttgtttgattccccatttgtttcatatggcatatgtgggtcagatgagatgttgcacatgaaagctcttttatgctatgtgttatgcaaatgtattcacttatttattcatttaatcaaccagatgcagttcctgccttcacagagcttaataattggacaaataagtaatttcaccaaagtgggaatgcgggtgatagggatagtgtgatagggaatgtgcagcgtgctatgggagcaccgtcacgagggattcctaattcagatgtggggacaggaccctggaaggcttccaggaggaaggaacatagaagctgagatctggggatggaatgggcattcaacaggcgaagggagtgtgatgtaattgatggcatggagagtattgcaggtaggaggaataatgtacagagtctggaagtgcagaaccatagagtactggtggaactgaaagtaattcaatctttctggaatatccagtgtggggacagataagtggatagggatgtggctcgtgatatagtctggggacagatcaaggagcgctttgcaggccatgctggggagcttggacttgatcctaaggacagtgtggagccatggaagtcttccaagaaaggagtgacttggtctgactttcattttcaacagtcattttatggagtaagacagcttatttcctcgccaaggaacttgaacacaagctcccaggaagggaggttgtgaaaacagtgaaagggccttccagaaagtaaatccttaagctccatgaaattagcttaaattctgtttgaatctgactggtgaatatcatagcaatgaggccaaaaaaaaaaaccttcataaaaacttaattatctttgaggccgtagctcatacttgagggaagggacatgggtaacgctagagacatatatgtttgcattaacttttacgccactgtggggcagacaattaaagcaggagtggaggagtcagagcagttttgaatctgcttttaagtcccagagagtgtcacagtacctcctacccagcactggttgccaaagtaaaagaaagtggtaacaatagggcataaggtggtggagaagaggctgggtagaccttggccatattcttgctttgcaccttacactgctataaagaactacccgagactgggtaatttataaacacaaaagaggtttaattgactcagacttctgcatggctggggggtctcaggaaacttaaaatcatggcagaaggtgaaggggaagcgaggcatgtcttacatggcagaggaggagagagagagtgctaagagagaagtgccacttttaaaccatcagatcttgttggtttaaaacaaccactatcgtgagaacagcatgggggaaagcacccccatgatccaatcacctcccaccaggtccctcccttgacatgtggggattacaatttgggatgagatttgggtggggacacagaaccaaaccatatcattttactcctggcccctttcaaagctcatgtctttttcacatttaaaagctaatcgtgccttcccaacagtcccccaaagtcttaactcattccagcattaacccaaaagtccaagtccaaagtctcatctgagacaaggcaagttctttccacctatgagcctgtaaaatcacaagcaagttaattacttccaagatacaatggggatacaggaatttggtaaatgttcccattccgaataggagaaattggtcaaaacaaaggggctgcaggccctgcaccaagtccaaaacgcagcagggcagccattaaatcttaaagctccaaaataatctcctttgactctatgtctcacatccagggcatgctgatgcaagaggtgggctcccaaggccttgggaagctctgcccctatggctctgcaggatacagcacccctgacacacagctgctttcatgggctggcattgagtgcctgcaccttttccaggtgcacagtgcaagctaccagtggatctaccattctgggatctagaggctggtggccctcttctctcagctctactaggcagtttcccagtggggactctgtgtgggggctccaactccattttccccctctgcctgccctagtagaggttctccatgaggactccactcctgcagcagacgtcttcctggacatccagacatttccatagatcctctgaaatctaggcaaaggcttctgaagctcaacttttgtcttatgtgcactcgcaggcccaacaccaggtggaagctgccaaggcttggggctcccaccctctgaagcaatgcctgagctgtactttggccccttttagccatggctggaactggagtggctgagactcaaggtgccatgtcctgaggctgcacagaacagggagtgcaggagggacccctggcccacaaaaccagttttcccttctaggcctctgggcctgtgatgggaggggctgccatgaagatctctgaattgccctggagacattttccccattgtcttggctatcaacattcagcttctctttatttatgcaaatttctgcagctggtagcttgaatttctccccagaaaatagatttttcttttctacaacatggtcaggctacaggtgttctaaacttttctactctgcttcccttttaaacataaatcccaatttcagaccatctgtctgtgaatgtctatgactgtatgctttcagaaaaagccaggtcacatcttgaatgctttgctgcttggaaatttcttctgccagatatccaaaccatctctctcaagtttaaggttacacagatctctagagcaggggcaaaatgccaccggtctctttgctaaagcataggaagagtgacctttgctccagttcataataagttcctcatttccacctgagaccacctcagactggacctcattgtccatatcacaatgagcattttggtaaaaatcattaaacaagtctctaggaagttccaaactttcccacatcttcctgtcttcttctgagcccttcaaatttttttattctctgcccgttacccagttcctaaatcacttccacattttcagatatctctatagcaatgccccacttctatcaggaccaattttctgtgttagtctgttttcacactgttataaagaactgcctgagactgggtaatgtataagcaaaagaggtttaattgactcacagttctgcatgggtggggaggcctcaggaaacttacaattatggtggaaggtgaaggagaagcagtctcctcccttgacatgtggggattacaattcgagatgagatttgggtggggacacagagccaaaccgtatcaaccagtgatgtggctttgggaatcacttaacttccctgaacctctgtttccttttctggaacatggaattagtactactgatttttcagtgttgctaggattcaatgagataaagcacagtcagtgctgctataacagttgttttgaaaacacacacattttttcaaagctgattgatgtattcagaaaaatttgagaataatgcaaattttatgtttacttacatagtcagttttatccacgaaaagtactaggtggactcagaagacggcactcagctaaagtgagatgcatggcaatatacaaacacacacacctgaaacatctaccagctcctcagttcaccaggtgtgttgagttacactcgagttacactcatccacatctgccattacaactttctgtccattttctgataaccagccccccacccaccacttcacaataacccataagctgtaacccttacaatgcccatttccacaagaaagtagtagtgtgttccaatcttgttttcccataaactctgctgtttttactgcacaattttgcatagtgtggtgatttctcagaactcatatgttgtgttatagcagaactgactctgtctaacacaattcctggcagacagcagacactcagtaacaggtagctgttttattattaatattaatccacttaagtacaattgtgggttggggcagggatccctagttacaatgtttagctgctttgattagtagtgttaagtgaaatggactgcctgagtggaagggttttggtgcttttatcttttctaagtgtgtgctggtcagaccacccttggggtattaacagtgacaaaccaggtatgtccagaaaagagcaagccagaaaaggagaagacatgagaatgatctttaaatagttagagggccatcttggaagaaggattgctttgttttgtgggtcttcagggtgacaaggggaagctcccagggcccagggttctggctagctcggggacgagcctcagaatagtccctgggggtgatgtgttctccaagctctgattggctgctctgggaggggagaggacagagaagagtcaagcacgggtttggaggttctatctataaagttccttttcatttttttttttccttcaaggtagtgtgcaaagacagattctgctgatcagagtaaatttcagacagaaacaacccaaacttttccagcagtatttggacttctgcttgcctgcttgcgtttttttttcttttgggtgatctaagagaatagttagcacatgtgcatatttacgcactggttttttttctagttatgcccttgaatgttgcaaatataaagactatgctttacaaatatttatggcttctggcatgcttaggaatagtgaaattacatcaatgctttccgtctcgagggcttttttttgacttttcttcttcttcttttttttttttttttgtttgtttgtttccaactcagggaaaaagctcagttagttactgacctggcattgctttctctctaacatcctgtgtagcttttgtcctctccatctaagcaggctgttaagctcttgtagtaagaaagatgttaccctgggcttagaccctctcggtggagctgagatggagaagcctccggaagcatggggcatttgagctgagggatggcaggatctgcttcagatatttaaagtgggttactctgagcctgcaaactagagagtctagtgtggtgtctctagaagaattacttttgtacccttagatgaattaaaaagtaattatactgagtgttttatcttgcctgtatacggatgtataagattccaggtttctagttgatgttactgttaaaaacagaagatgttcaaacatatttgattttattaaattagttttccctgtagtcataggaggggtactgctgtttacatgctgaatcttagcaaaactataaaatagcatttttaaaaaatggcagctcttctgttctgatgctttgacaattaatgttatctctttttgtttctatgatgagcacatgggacttaggcttactcttaaaatggatttttccaaaaccaagagttattacatttcttcctctgagacaaagtattcaggcctcctcctcttctagcactcagtctggaaaatgtggttagtctttccatgtgggagctcttgtgctttgtgcattggttccaagatggcaagtggactactgttccaagatctgggcccaaggcatgtcgttgggctcgcctgaacttgtatataatgaccagaaggaattggtctgcactgccattaccgccagccactacctgatcaattctgcttgggaaatggctctaatcaacattcttctagacctgctgttcatggctgcaggtggcaggctcatggatcaataattggctggggcggttggccccactggtcaacctcactccttgagccctatttacctgttgctgcctcctccatcctcccctaaagtcacacagcttcaaataaggtggtcccatctattttggtgctttcccttctttcttaacctcccataatggaaaaagcacaggttccagaagcctggttttaaatctcagctctgttatttatcagctttgtgattttgggcaagtgacttaatctctctgagcccttgctcactcattttaaaatgatgtcactcatccctttcagagctgttaagaaaacatcatgcaaaccatctggtacagtgccagacacagagaaagccttctggaactggaatccacacacaccttaccaattactttttgagtaggtcaattgccagcatgtctccagagcaaaaagattagatgatcctcctttctttttgtgccaggttctgcccaggcccaggggctgcagagatgagtaagaggaagtccctacctataaaggcactcccagttttgctaaaatccatttttccaacaaacgtattttgatacctactgtgtgcaaaatttatgtgcctttggggaggatactgagatgattcagtcactcatttattcatcggtcatcagtcgtgtgccagatactgttagaagcactatgggtagaaacaacaggcaagacattgtccttccttttgagaagctcatagtgcagtaaaatatactaaagtatgggagaagtagatagaaagagaatatgatctcattgttaaaaggcacttgtgttgttggacaatatagggtgcacacagtaatgtggatttcatttttgcaagtattcagatcttgatagagcttcattgagacaaccgtctccttttagaggaaatggagcttgggagtggttaatacgtcacacatttaggttaaagtaaagctgacactagccccacagaaactttaatttgtgtagtgactaaagtgaaaacactctctttcttcttgattctattgtctcccagcagagattttataatttgaaaacattgttccttaggtagccccaagaggtagattttcagatttgctgcttgctttttgtaaactattgcattccttcctcccaatagccccactggggtcaggaccattttgaacttaaagaacttgctcaaagttacacaacttgacatacaaagtcaggatttgaatccaggtttgcctgattccagagtccaagccctaagcctcaacaccatagtccgtccatgattcacactcattgtagtgtctgatggcttttgagactttgtagaaaaaagcacatcttaaatcatttttaggacctgtttatctgaaccagtggaaaaactaaatttacgaaccataaatagtgtctatagatgtggaatgccaagtgagttaggatatattaataaataggaacaaaaagttatgaccaaaagttgtgttttcctatacccagtttcttaagatttcataattagcaggggggaattctgagttgatgagtataaaaaggcctctgcaggtagcccaagagacgatactaaagtccagaggttataaacagaaagaggaacagacactgtagatttttctctactccatgacttcttcttgcagaaattctgcacttggcactaatcagacctaaaattaatttcttaaaatcaccaatgccttatttaaagaggttaacattctgcatgtagctgctccactgccaaacaaaaacacccctggttcttttgtgaccactaatgcaattgactttccatctttttaagaatgccccctcctatccctccatctttgtctcccaattaatttatgtttattttgtaaaaagcttgtgggcctgttgagttgatattgctaaaggctgacaaccacatagaggtacctcttatagcgatgaagtgtgtgtgcgtgtttgaattatctgttaaccagcatcaagacatcggttccctgtcttggatgaatggcaggggaggctgagcttaacttggccaaagcagcagggggctaatagaatgtttctgttccccataaagaaaggtagtcaagcgtctgtactttccactgaactccagtttctatcctgctttgaaaattctgcttaccctttcagtgagagccacatgacaagtgttcagtatgtcagatttgttttcattttattactacgtatgaatttgacctccacagtagggctgcattcatttcccaaagctcttccaataattgtattcttttaaaaaatatgcatactattattctttttcagattgtgttatggctggtgttttgaaagtggttaaaggatgactggttgcatgtggagtaatgtgtacatgatgcacatttccagatggaaacagccctcaaagttccctatgtagtttgtgtacctattctactcatttcattagactgaactcagtactttctggccagtagagcaggtttttttctttgacaaaattaaatttggataaccttttctgaaaagcaatttcagtgtgtcatattgacatttatattgataattaattgtttgtggctgtcaaaagaaagtgtgtatctttgcttgaggccaggagttccagaccagcttggccaacatagtgagacgttgtttctacaaacaatacaacaattagctggacacggtggcgtgttcctgtagtcccagctacttgggaggctggagtaggaggatcagttgagcccaggaggttgaggctgcagtgaaccgtgattgtgccactgcactttagcctgggtgacagaaacgagattccgtctcttaaaaaataagtatgtatgtaattgtgtatgagctaagttactcttcctgtcacatttgtatggtagctacagtcaggcactgcataatcatctttcagtcagcgttagaactgcatataaatggtggtccaatagggttataatggagctgaaaaactcctagagaggctgtagttattgtaatgttgtagtacagtgtattactcatgtgtttgtggtgatgctggtgtaaacaaacctgccctgccagtcctgtaaaactatggcacctccagttatatgcagtatacctaattgtataatgataatagtaagtatatttgtgataatagtaagtatacttgataatagtaataaacaactatgttagtggtctacgtatttactatactttttattattattattttagagtgtactgcttttgcttctaaaataaaacattatctgtaaaacagcctcctgaaggacctgaaggcaggtccttcaggaggtatttcagaagaaggcattgttatcatagcagatgacagctccatgcctgttattgccccttgaagagcttccaggggacaagatgtggaggtggaagacagtgatattgatgatcctgaccctgtgtaggcctaggctaatgtgtgtgtttgtgtcttaatttttaacttaaaaatgtttaaatagaaaaaagcttatggaataaggatataaagaaaatatttttgtacagctatacaatgtgtttatgttttaagctaagcattattacaaaagagtccagagttaaaaaaataaaaagtttataaaataaaaaagttacagtaagctgtccaatttctattgaagaaagaaaatactttataaatctagtgtagcctaggggtacagtgtttataaagcctacagtagtgtatagtaatgtcctaggctttcactttcactcacactgattcacccagaacaacttctaattcctgcaagctccattcatgataagtgctctctacaggtgtaacatttttaatcttttatactgtatttttactgcatcttttatatgtttaggtatgtttagctatacagataccattgtgtgacagtcgcctacagtattcagtatggtaacatgctgtacaagtttgtagcctaggagcaataggccatatcataaagcctaggtgtgtagtaggctataccatctaagtttgtgtaagtacgctctgtgatgttcacatgacaacaagcatatcaactaagaatgcttttctcagaacatatctgttgttaagtgacgcatggctgtaattcatgcattaattggttacttgtaccctctgtttagggcttcaaaagtcagatctgtccatctaagatgcttttaagtaacatttaccttaaagaaatagatggttgattggtttaaagaaagagacagctgaattggacggggaagccagattttgaccatatttctaagaggagctgttctgtaatgttttggtaaaagaatgtctgtctccatatcatctatctatctatctatctatctatctatctatctatctatctatctatctatctaatttggcatctatttatccattaatctgtctgtaatacaaatattccaaacatttaaaaagtataagaaggctctgtagtgcaatggatagcacattgaactttttttttgtttttatattggcttattgcaattaaaaaaggtgcaaataatatatgtaccaaagaaaattcagaaaataaagaaacactgagaaagtgaaagactagggctcatattataaacacacaaaaaatcacttttaatattttgggtacatttccttgcaggcttttttgccctatgcatacatttttatccataaatgtaatcatcttgtctatgttattttgtagcaagcttttttttcacttaatacataatactattttttccaagtctttatagatattgtttttcttttcttttatttcttttatttagccatcactcagtgattggatatttagggtatttcatcattattttctttgaaaattaaataaaacaaaatttgatgaaaatccaaggtggcccaacacagtggctgaatatatctcatcagtctgttacattattctcatggaaatggaaaaacaacccccaaaactctgcatctgagaggagtatatattaagcttaaggaagtgcttatgaacagtaggaaatgagagttggtaaatggagtcattttatttcataaaggtgcctcagagctttaagcccaaagccctacactttgagtcactttggattttgtgcatccatccatgatgcactgtgattttgtcttacactgtgtttggtatgaagcattaaatcttcctccctttacagttttcagaatctgtgaaataggacctgagctaacctagaaaagtctctctgcttgtcgtttagtttttttttttttttgagatggagtttcactcttgttgcccaggctggggtgcaatggtgcgatctcggctcactgcaacctctgcctccggggttcgagtgagtctcctgcctcagcctcctgagtagctgggactacaggtacacgccaccacgcctagctaatttttttgtatttttagtagagacagggtttcaccgtgttggccaggctggtctcgaactcttgacctcaggtgatctgcccgccttggcatcccaaagtgctgggattacaggtgtgagccactgcacctggccttgtttagatattttaaaataatcttccaattctgagtaaatagtatttgtataatagttgtgagttgaaggcaaatagtttcaaagagttcagttcttttgtcttcaacatataagtcataaaaatgcatgattctccctgaggagccagcttggcatcagactctggagccagacagactgggtttatttcctgccccaccactttctgctgggtgaaccggagtaagttacttgacttgtctaggtgtcagttttctcatctagaaaatgggaataatactattcattcataggtttgttgggctggtttaaataagttaaaacacagtgttaactactactgttttcaacaggttcctaagggtctgtgtttctagcgctttagcacttcaatggcatttataatgttctgcattatctctaactgagtggtttttctatgagtatttctatgagtatttcttccccaactagtttatcatgatggttataatactggccaccatttttgatggagtattataatacatactctacatgtattacaaaatgtacgtctcattgccatttatgaggtatgcattttcactgttttctttttacaagtttagtaactaaaggttgtagaggttaagtaacttgctcaaggtcataaaattgctaaatgtggaacttggaactaaattccggtctggtgtatgtgccaccaccctgcttttgtaaattcctttaaggaagggacttttgtgctttttagatcccttacagatttcagcactgttccttaaacatagtaggtcctcagtaagttttttgttatgttgaatgaatgaaggtaggagtgatcctgtggataatagaacttttttctccaataagaaaaccaacaatattgctttttaatgacatgatattatgagtcttagaattctgttctgcttccatgttacatgtaagagtttgtaattatttgtgtatgaaactggttgtatttcatgtgaaacaaaagtacataccctgtatttgagactctgatttgagaaaacctggattagcattacacaagtaaccattgaagcaattttaatttaaataaaggatacaactaattctggatctgtttttagccatttatttaacagacatttattgagcatatacattgtgcaaagccctctgcaggggactaagggtttaaggatgaatatgatggtttctgtatgaaagaggattttatccaatatcatgggtttacctatgccctgatgctaatgacccctatatatctttaatccaactcttctccttttgccttcattattcagctctatgttggatacttccacatggatgtctcataggcctccaaactgaatttattatctcatccccagcacccactatgcctcattatatattacattcttgtacctgttatatatttcacctctgttggtgacaccactgtctaaagtaaccattcaaaccactgtccaaacttcaaccttcaaacaaacaaacaaacaaaaaaaccagaagtaatatttgattccttttttctccctaacattctacatttggccattcaccaatcctactgatttttttcccctaaatatcatcaagaactgtgaaggatttgagactttatcttacttgcaaatgaacttgcctgccacagttccatagatgctggcagaaggattcgtgggttagagacaaagaaatttattagtcatagcaatagcaatagccagagtatcaacatatttattcactgtttctccaagacccaactcccataggatgtcatgaagagggccaggtgacatccatacatgaagtgcattgcgttacaggagagaaactctgaacttagggaacccaaatcttttatattgggcaacaaagatgcttcacctttgctccagagggagatcatttcttccaaggctgctctccacataaacatctttgaaaagttagtctggaaccaagggcagccagtgctttgctcacaagatgtgcagaaacggaagggactcatggagaatgtctcccaacaaatatatcttgcatctgttccctttgctccttctttttttttttaatcgaaagtgccttactggtcctgcttccatgagtagcagtgaccaggggaaaagggagaggaaccagccagcacagggaggggtcatctccacaacattccatttatacacagaactgaacagcaagcatagagtcactattgtggttagaagttggcagcatgggaagggggaggaacaggttggatgtgggggtgttgttaaaaatataggcccctctccacaactggggtgcctggggggaatttggtttgcttcaacccaagaggaataagaagatcaaaagcagtttggcaagaccagaaccgtcagggatggagggaggaggaaaatccagggagtggggggatctgtttggcaactggagtgaagggattgccctccccctgctgggatccccccagcccctctggtctgggaggaaggggacggcctgcaacccccgagggcagatgtggggctgccagatgctccaggcaggtggccagaaccggctcacaaaggcttgtcctctagggagatgaccgcactgccccccagcttctctgccagggtgcagcggtccttgacctccttgtagcagtttgtgtgtaattcatgcttgatccctgtcagcttcttgacggcgtccttggagctggcatagatcattttgcttttaaggggagcagactcagggacccagaagataaacaccaggtcctcctccttgctctccttggtctcgtaggttgtgtcacagagggtgtagtggcagtccttatctggcagcatcctgacaaaggtggtgtaggggtcgtcgatggtctggctcacatcgcccaccaggatcttcttggtctcctccaggatgatgttcttcttgtcctcactaaggcagaagagcaccaccttcttgagcttcttcacctcctctggcattgaagacttatgcaacttcatgtcgttgaacatgttcatgacaccatcagacagccacaccagaggccatgtttccagaagtgaaaaggagagggcatggagagccgcagaagacaagagcactgcagccgctgctgggacccgactgcactctgttccttctttgcaccattagatcaggctgcacattgctcataggaagattgcaacaactttttagctgatttccctaactctgggtgggtccctcttcatattagtcctccacaccttgctgaagtagcctcctgagacataaatctgactcttccctgcttaaagccatttactgcctgcctattatctataggaaaggcccaagctccttagcatgacaccaaagggattttcagaccagcccttgctaatccctctagccttaggggggcagcatatcagagtgattatctcccttactctcccagtgacttaacctttgtagcctgtttcctcattgctaacattaggatgataaaacctacctcatgggttggtgaggaattaatcagctcacacatggttagccctcagtaaacgttggctgttatggttgtgtctttccactctctgcctcgcactttaagatctggctacatggttttctgctgactctgtgtcccttttcaccatggttagtgcctttattcctgccacccactcttcttgcaatgtcctccaaaccctgttgcctggcttcacgctggttaggcacatcctcttccttctcttggatgctccatgcatgtgtcggccattgagctgtaaatatctactaataagtcagttactgctgctagactatcaactttatggggatggggggtgttttatttatctttgtgttgctagcacatagcatgtgttgaaaaaaatggtgaatgaatacatgaaagaataaaaggaattcacagtctactagggtgtttggggtctagggatgaagggtggaaggcagctaagtagcttaataataacaggttagagaatctgggtaaagctggggctgaggtgagaattaggccctataggagtccagtgtagggagtttgcttgttgagtgtggtgcatgtagtgaggaagcctgtttaaagttatctcctcaatgaaataaagcagccccttctaggcaatcctaattactccctttcctgaaagaatatattgcaaatggaaggtcatgcaatctgccttcttgtaagatcttcaatttctcagaatacaatgaattctctattacctggaggaggggtagaaaggagcttctttttaattaaattgtctctgcagcagaaagtgactttatcctgccttttgaagtcttccagttgtcctcagcctggctcaaatcactctccttgaattcattgttacactagtgcaccctgctttgtgagttataatttaacgtgagcgtatctaattctctaatgagatggagactctttgggagtttatgtttttttccctgaaatgtttaatgtcatgcttttgaattaagaagggcttctacatatatttatagactggctgagtttctccatatatgtgttaagaactttcaaataattagagcacagcctgaatttcagaatgccagtgatcttctccagggcttcagcttccctgaaagaacagctactcagggcctattattaaatgtttaaggtatcattttttaactttgaaataaaaactgaaatatttggaaaatactgataaacgaacaaacaaaaaaacctgaactaaccctactagtagtagtggtaactactatacaatagtatttggagtatatctctgtagtctgtcttccttggctttgtgtctttgcttctctttctctttcaatgaatgaggtcatcttttatcactcatctggcaatctgctttcttctccttaacatcaatagatatttattaaaagtgatgatgctggagtatttcttttaggttcctgtttcaatccttgacccactgttttgccttgtttgccactgcctgccttttcttgatttctgtttgtctctctggattgacccattattgtgttctgatctctgatacctgcatgcatcttcatagtaacttccaacttttgggagtgtctgctgtgccccagatagttgtatgtgttttacctgctttaaaaatctcttttcggatagactggatatttgtagtctccatgtcacagatgaggaatttatttggtgtagagatttagtaatttataaaagatcatgaagcttagatggagcctgaacttatgtttttatactcagcaccccctctagtatgtgaaactgtcatctttagcttctgactccttctggaatactgatttttgggtgctgtgtctaatcagctttcagctctacaatattccttgaagggcaccgcaacccacaaccttgggccagcatagtgaattttatattttttatttgacagagagagagagaatgtgtgtgtgtgtgtgtgtgtgtgtgtgtgtgtgtgtgtgtgtgtgtgtgtgtttgagaaatcagcagctgtggttcttgctttcactcctcatggtgaggaggtggcctacccctcacatctgttttcagcccctgttcctcaataccagagttattttctattaactcaatgcaccttttctttgtaattcttgtcaattttccctccagccacctgcgcggtctctggcttgctctcaggctgtgagtaaattctttgtatacttgctgttttcgataacctcagcccaagacttaatgtcaaggtgggggccctattaaagatgccatgaatcatcttgtctttgtttgaagatttccgtgttggcaagtgggcagatagatgtaggtttcccaaccagatgtactggtagctgagatgggggcattcagctgaagtacattcctatcattatttggcaaagaaagagccactgagattaaaagcatgatccttgcttgtgatctggcttcatcaacggaatcacagagcctctgtgttggaaagggccttgaaatcatctgcaactgcgcggcttgatacttgagggaactgaggcaatagatacaggaagtgatgtaaagttataaatgccaaaccttcaagggacttttgacatgacgtaactctgcgctcttatgttttgggggaagaatagtaaggcctctagaagctcactaacactcctaatgcggcacagcgcgttactgcagagcaaggactctactgaccacaggcccaggacagcggccttggaggtgaagtcactaagggggatctgtaggatttggctggttacaagagctcacccgctatctcctccaggctggcttccgtgggcctctgttgaactatcagtccagtgttcttgcctctgtccccacagccctgcagaggtcttcttccacctgacagatggtgactgccttctccacagtggtaggagtgagggaaacagtgaggggaaatcaggaaacaggaagccagggagaggagcaagaggtgttggggctgtatgtgctggctccgtgccttggtgttgtgggtttctagagggttttaactttgtagtaaagacgggacttggaggaattctccctgtggtgggacaggagttttctccacagccttcacaaagtattccccgcaagaactactcatccttcacggtctacttctatcgtagcagttcagtcttctgctgtttcttctggtaccagcctatggattgggtaaggagaaagatcaggtttgtaaagagatctttctggtccttccagtaataaagccccttggacaagggccagggagattcatctcccagagactcctgtgctctaggtggtggtagaggcttcctgccagaaggatctgaggcagaggacgtggatggtgccatgctggcgtctctgtgcatctggcagcgcaacaaaggacttctgtctgccctgcgaggctgggtcggtaaaacccacttcaattgaaagccaccacactttagcaacttgataattaaaattctaatatgtgaattaaagaaaacaaggggctgtgttcctgccatattaaaatacagctgcagtgattccactattgtttcctttgacagagctgtggttttcctacacacctttgtttgaggctttgattcagatatactccctgctgctgataagtcccatgtgtctactcatcggttagatggtgcatggggatgattcttctgtgatgtggagaatgaaagatcgtgtcttcaagttatgtgaggtggctaagtgacatctcatcaagagcagagataaaaacaaaactcatggaaaaggtacttcctgagctccctttttgtttcctaagtgatttaaaacaataaaggccaaatcgaagagaaaacttaagaaccgatatagctgatacctggacttacggattgatttatttctgtgaacactctgggaaaatggccacttgtcgctctctgttattaataaagaggtcactttatcattaggcctttgaatctgtatttaatggctaaagcagatggttataatttctgacttggtgtggccaccttattaataaaaaagaactgatggaagcaaaaaggcgtcttcatttttaactccagaagcataacacaaatgctttccagtctttctttgtgtggagagcagaccaagtgactgcaataagatcctgttacacatttgaaaaaaagacttttgcagagtggaggtaactcagtttgaatccttcttttgttaaactttaaaagaacactataaatatatgcccctttccttgaagaaggtatttcgaaggaagcttcaggattatattttaaagtaaattaatattttaataacataaggaaactaaaaaacacctaatttatttcagatagtggaggcctgtggtactttctaaaattattctttttgcttaaactactataaactgcttttttggatttaattactaggcttagatgaatgtgccatgcatcttattttggttctttttaaattcacttggaattaaaaaaaatcaataatggcaaaaacgtctggtagtggatttctgcttgatttcatcaagcctgtatattcccctataatggtaaggagtttgaaatcgtggttatcatcctggaaattttttgtccccaaagggacaaacctacatttgtgaagacagaatgatttagaatcttaatgtactcagtaaaccgagtgaacagagcagaaaaatgctgggaattcttcacataggctcagaagagctctttaattcacttagataccaaagacttattgatatgtcaggctgtgggcggcatcctggggtctgttatggcaatgaattcctggtccttaggtgacaagaatgggatgagtgtgctatgcctggctctgagataaagaaaaaacatggaatgttaaggatcttaaagtctttacgggtttctttgcccactagttttcaatgttttttaattaatgatgcctttcaggctgtccatgggcccacgtttagaagtgttttgaatttcaaattattaatggtaattgttgttttctgttttcattaaccaaaggcatgtataacaacccattcagttcatttgtttattgatttgttcattaattcttcagtatttagcttgtatttacttttggcttggcaccatgccaagcacagggatgcagaggagtttgtgatggccaccagtcttatttaaaatgcctaaaatagggtcaggagcagtggctaacacctgtaatcccagcatttttggaggctgaggctgaaggatcacttgagctcaggagtttgagaccagccttggcaacatagtgacacctcatctctacaaaaaataaaaaaagttggcggggtgtggggtgggcgcctgtggtcccagctactccagagactgagttgggaaggtcacttgagcccaggacgtcaaggctgcagtgagcagtgatggtaccccacactacagcctgagggacagaatgagaccctgtctcaaaaaaataaataaaaataactaaagtgctccacaacagtggatggatttttgtttttcctaccatctcagattcctggatatctagaccaatccattgctaagccatcgtgctttgttttcttttttaaactttgaaatgttttaagtgtacagaaaagcagacaaaagtgacaaaacccatttcagatacaaatattttttatttgtttcagatttttaaaagaaataaaacattatagatacaacaaaagctcccagtgtacccctcctaaatcctgtctcttttcttctccagagataatctgtcctttaaatgtgatgtcttttcattcccatgcatgtttttatatttttgctctctgtgcataaatgcactgagtgctactaaaaatagtgctttgcctattttaaaattgtgtataaatgggaacttactgtacctgtcatacatcttgctatttttgctcaatgttgtgtttttggtattaaccttgttaatttaggaattgcatgttgatctaagaagttattttagttgctgtgcagtaagtatgctattgtatgaccatttcacaattaatgtacccattctcctgccttcatttttttgtgtattataaacaattttgccatgaaaactttgacttatctttctgtaaaaatgtgtgaagtttttctaggccaaatacctaggaatagaatagagtatgcatgtcttcggcttccctaggtgctgtggaattgctctccaacggccttatgccagtgcgagctccttcctacaggatataagttcccgttgctctttaccctttctaactcttgatattggaagtatttttagattttgcttattcaacaggtatgagaaactatcacagtttggatgtataaagatatgtcaagttgagtaaagatgttagagcaaagactggagatttttttttccttttcctcctgttctagctgtattgttctagctatattatagggcagatttgagtttctgcttgggtagaattatcctcatcaaagcctactttggccctaattagtttgctatacatccattgtacacagaacacattatgtacatttctaaggaattgaagagacaaagtccaaacttatagaacctatgttgggggtgcatagcaggagatactggggcccaatttacagtaggttcattgcactggccagtgaattcagggaccttgctctctatatcagcagagattgctgcctgtgtggttttttggttttttgttttgtttgctttttgtttgtttgtttgtttgagacagaatcttgctctgtctccaagctggagtgcagtggcacgatctaggctcactgcaacctccgtctcccgagttcaatcaattgtcctgcctcagcctcctgagtagctgggactataggcgtgtgccaccacgcccagctattttttgtatttttagtagagacggggtttcaccatgttggccaggatggtctcaatttcttgacctggtgatccgctagcctcggcctcctaaagtactgggattacaggcgtgagccactgcgcccggccgctttttgggttttaatgtccataaaatgagagattgcattagtcattccttcttcaagagcagattttcttttctgctttcaaaattccatgcttctaagtggcgttgacccttggtgctttaaaacgtcttaaaaatcactgatacttaattggtattgagaacagaggaacttaatgcaggagccaccactaagtgaagagcagttaaaaaatgctaagaagtcacctgcaaaattctaatctaattaaaattatgtaaaaaaagaccaccatcactcatgtataaagatgacagggaaaaattacaatgaatagactgtgggtgattattcccctcattgccctatttttctgttttccaaatcttttttaatggtcatggagtaatattcttggaataaaataataagcatatgcaaacaattataagctcatttggtaggaaaataagaatgtgatttatacaaaacatgtgctgggcaaaggggagaacacctgtatatgaaaaatgatttgtaatgattttgtaaataatcctataatccttccttgggttaagggttggtggatgataagtgtttttctttaggttttgctgctggaaagatccagggaagatggaagacaagtagactggcatcttacctaaaagcagtggcacagcaggtggtagaataatttgagcttcgctcattggattttaagaccaaaagaaaaggcagaactaaagagattttattcattaggtcacgtagatattcctattccaaaggcatatgacaaatccttcagagttgaagtaatcataatgcctacaatatattaagcattaaatatacatatatttttcaattctggaatagctgtgaatgtgggaataactgtactgactgacaggggagagatcagatagtttaagaaacttgccccatatgcacagctcatcagtggtgctgcctggactcagccaccatctgtttcactctgccggggcatacatgtatgtgtacccttgccctggcaaactcttccttttgtagagctgaaagcagccccctgcaactttcctatgtatttattctcatcctgccctcctgagcacccagccttagaagtctgctccctctttcgcacaacagcctttctgatcttcaaagagggctattgtgtccatttctccacttctcccctcttcggtctgtcatcttggaaaagctcagagaggtgtttttattcacagatgccttgagaaatttcatggtttttagactcatgctgagtttgtccagatgtgccaatatttgtcttatatgatacaaattaattgtccagaagaggaagaaacctttgtagacactcactaatgcaaaccagttcctttgagtattgatggaaggaaaaacactaaaaaatgaaacagatcattttcactgggagagtgtagttgttgaattcacattctacttttaggacaaatctgtagcatgacagttcagtcttaccacatgtattaaccatgggaaacctagggtgacatttgcaatagactcctgcttttctgtaaggactttatacagatggagaaagtatgatactcttacattttattaccaagttctgtggcccagggtttacagcataaggtggcaaataatttagctccactcagatttggaagagtaactattattattataagtaagatttaaacttagggacaggtacacactctttaaggagagttctaagactgagatgttgtatcattatcagtacctggcataaatatatgtatctgagttctctttgagaatcataagggaaaagatgtctaatatgatttaacctcaagacactaacaatgattacacctatcccctgctcccagcatcatagtcaccaactgtggcaacagctgctgctaatgttttttgaactcctgtggtatgcctggtgatgtactttatatcagctagttcattctcaaaacttgagaacacactacatataccctagtaagtactattgttagcctcgttttatagatgaaaaaactgagaggttaagtattctgcccaagatcatatataggttgggtatccctaatctgagaatccaaaacccaaaatgcaccaaaatctgaaacgttttgcatgccaacatgatgctcaaaggtgctccttggagcattcagattttggatttttggattaggaatgctcagctggtataaacgcatatattccagaatcttgaagacatctgaaacatgtctgatctcaagcattttgggtaagggatactcaacctgtatcttgtatatagtagagtgagagtctagcttatgctttgctcttatatcttgtttctttcttcagcaaaatagtctgtaaattgaacattaaacagtgcactggggacacagtaaggaatctttcattaccaatggagcatgaatgaaagtttccaaatatgaggtttccttagtgaaacactatttttaggaaaaactattaaaccaaggcttatgataaaggatcattccacatccaaatatacctctcctgtattagcataattctctactaaaatcacagctgaaattcattcactctaagagatggataaaaaccatacggtttcatgtaaagatcaccagcttcccagaactaggatgatgggaattttaactaatgctgctgtgactgtggcctagcctcttactctttctggatctcagtgggcccatctgtagaatgtgagcattggcctctgtgataatgaatgttccttctagctttgtatattgcatagtgcatgactgctagcttcaggaaaaataaaacgttttcaatggaaatatcagatcaccaacctgattccaatgaatttttttttattcactgaggctttatgtcatataaaaatatgtgacgtattactgctctgctgcccatctatttaaggcattcttcagtagacttgtcagggcttatctaaatcttagcaccacttacgtgtggctgattgcttggcaggaggaggttcctgcattttcttcctcctgtgtattagtgaattgaaatcaagggaaaaactgcttggctttctgcttccttccatggtaggtagacttttctacatattttccaacagttctttttgacagccaagtctggaaacagggcaggatggaggttttacaaataggtgacagttgtttgtctcatgaatttcttctatttcctttccctagtggagttaactgcctccttcctacaacaatccgaacgtacttccatcacagagtatctagcagtgtgagcaatagccatttctctcttttacctcttctggattctaaacccatcataggtagagatagaacatgtctgtgcttagatagtatctggcacatacagattgctcacttaatggtgaatgaatgaataaagaagaaaaagtgatgaaagaagaaaaactacagtcgtctcttggtatctgtggcacattcgttccaggaccctgatggatgccaaaatccttggatgctcaagtctctgatataaaatggcatagtgtttgcatctaacctacatacattctcctgtatactttaaattatctctaggttacttataatacctaatataatataaatgctatgtaaatagttgttacactgtattttaaaatttgtattatttattattattatttatttacttatttttccaaatatttttgatctgtggttgattgaatccatgggtgtggaacctggggatatggagggctgactatatatactaatgaacactactttggattatatgaaaatacccatttatgaaatggacagttcaaatgtttcctctttgactgttcttaacctgacctcccaacttgaagtaatctgttcctctcctctaaacagttatgtgtactatgtgtttggtaattaattatgtactgactcatgacatttgtttctgttcttataatactttttgattttcaaataccttatgactttgttttttattacaatttgttttcccatcaagattgtaaattcttggaggcaagggcaattattaaatactatatttgatacttaattcgctcctctcctttgggggctccagttacatgtatattaggccagttgaagttgttcctcaactcactgattctgtttacttttttaattccctttttccctctgtatcttattttggatagttttgatttttgtgtttttgagtttactaatatttatcctctgcaatgtctaatctgatgttaatcccatccagagtatttttcatcgcatacattgtagatttcacctctagaagtttgatgtagctctttttttttttttgagacgtagtcttgctctgttgtcaggctggagtgcagtggtatgatctcggctcactgcaacctccgcctccctggttcaagtgattctcctgcctcagcctcccaagtagctgggactataggcgcatgccaccacgccccactaatttttttttttttctgtatttttagtagagacggcgtttcaccatgtcggccaggatggtcttgatctcttgacctcgtgacccgcccacctcggcctcccaaagtgctgggattacaggtgtgagctaccacgccctgctgatgtagctctttttcatatcttcagtgtctccacttactttttgaacttagggaatatagttataataaccattttaatgttctgtctgctaattctaacatctgtgtcagttttgattgacttttttttttttcctcctcatcaggggttatatttccctgctttatgaatgcctggtaatttttgattagatgccagacattgtgaattttccttgttgggtactggctatttttgtattcctacaaatatttttgaactttgttctggaatgtgtttaagttgtttagaagcagtttgatccttttggaaagtcttgctttgaagatttggaagactgaaatagttgtacttagtctataactaattattctccatgacagtgaaaacactcttctatgtgctctcctcgtggcgtggggaatcatgaggttttccaatctggaaatatctttttggatatttctttccccagtgctgggtagttgccacacatgtatgcactgatcagcactctgctgaatacttgagggggattctctgtggctctttctgcagctctcttttctctgatacttggccttgcaaactctagttgccttggtctccctggactgttagctcaattcactcaactcaggcagttcactgagctctgcctgagttctccctttcctccagacaccttgagctggaaattctctcaggcagtaagctggaggactcgtaggattcgtttcatttgccttccttcttccagggatcactgccctttactgactgttataccagtcttgacaattatcctgttactccaacttggccagaaatggaagtgatacattttattctttctgtctgaaataatcctccatccccaatgtttaaaaactgccatccttgactccatgtgactgtgttaggagccctttctctggtctctcatcatacctgtgcttacagtaatttagtgcggcactcctctccctgcgttgttcttgcatttttttttaccctctcttttctcgttagattttgtttccttgaggacagggaatgtctttaatctcgggatttctaacacctaacatagactcaggtgtgtaacagttgctcaataagtacttgttgaatgaatgaattaataaataaataggattcaattttcaaagtatctgttgttgaacaactttcagaagtttttttttttttttacagaaatgagattagatatgcatcttcatatatgcaattgaaatctctcttaaatttctagataatcagttgttgttgatggcttggacatggtttttacctatttattttttgtagcctctccttagaaggtgttaataaaagccacctagttgatgcttgaaacaacatgtggaggtaaagggaccaagaatagaatagccatattctataaacaaacaaaatgaagactaacttttaggtatctgttttatgatggaccctcagatgtggtatatcccaagtctgccaggaggttgttcttatctgaagtgccttttccatgttggatgtacttagatgccttttatccaggtagactcagatggtctgcaaatagctctatggatttggcattggaaaacctcatggttccccaggcatggggagagcacataaaagtgttttctctgtcatggagaataaatagctgtgagtcgttgcattcttatcaactggagacaattgacagtggatatgtgccactagagttatggtcaagtgcaagttcatactatatttggatctttaagagtcggtagaatgaaccatatttggtaagcctctgaagactgtcttgctccatttcctcagcagctcttggttaccaaaggtgactctggagccccacctccaagtccccatcctgcacagttggcatgatggaaatggcttgaggttcttgttctttcagattcagtgttttcatctgtgcagtaggatataagtaggataagatgtaatttgtcaggttgctatgaggaataaatgaagtaataaatgttagttgcctatcacagtttcaggcacatgggaaccctctccccattcccccaaacttaattgaaaagatagccatcagcctctgaagttgaattgtgctgagtggttactaacattaaagacatatggagttattgtatctgtatctttcacttatcagcttttccttgaaggtttaatgtgtgttcctttgcttttaggccccatgtttattttcctgaaatggtgtcttcttgacttaaagtacaatctttgcttttttattcttttttcactgctcttgcctggtgatcctgttgtttaaagacatctccatccttccctatcctttccctttcaaatctatggcccagactgggggtggctttaactaacaacagcactttgcattagttaagtagagtggaatttctcattctacctctcagctattgatgaaacctttccctgatgcacaaattaagactgggtgtattttgcatattttcctagaatgacacagtgattctgtggctaaaccaagattagaccctaccactttaaaaaatctgactttttgcttaaagtgtaaactgtgttgcttctaaaactactagttgaatttaactttcaagtgtactttgtatttaaatctgatgatagtgttgtttttccttttgtcttgtttagatgagggtattttcttcacttccctgacccctagtgcctcagtgacctaggcagcaagttttttgatgctgtccagaatgctaattaagatatttattctctttggccctattgtttatgatacttgtaattatgtctattagatggtaatctctgttatctcccactatactaagtgtactactcggcacataaagaaatgtgtgagtatgtgaatgtatactcacatgtttgaataaatgtgaataaatcaatatatttatatagttactgatttaaatgtgttccgtcttgggatgtgagatgggataattgaataagaaattagcctgtgtgtgttaaggtagtcaaagtttttatggtacctttgtacaaactgccccttctgttgtgtgtgtgctgacccatgtcatgatgctcagcatgactggaggagtcctggtgtgtttctgtcctcacttgctccctgggttgggcgcccctctgcagggtacaaccaacacagttgtatgaagaccctctgactttcattttctggctggctgggggttttggtgttgagcgcttttaagtaagacagtcaccttatcctactcaatgttttcttgaagtgcaggccctgtgaagatgaagatcccctcttctattttggggacacttttgtgatgcttttatctgtctctccagagtctgatttaatgaaaatatgtacctccctcaccacattctgcaaagcttacttgagtttttaaaatttaatagtaaatatgttagtacatgttgattctagtgcccagcacatagtttctgctcaatacttagctataattattagtttatttaaattgccttaatcattcatgcaataagcaaatgtcccccctgtaggctgttctccagatctgggatacagacatgggtaaagcttggagcttgtgtataagtagcggggtcagtcgcctgccagttcactggagagatgccatgcttggagggtggactgactgtaaggccctcccagttgtcagactctaggcttctagtgtgccctccctcactgtacagctggtcaatgcatggcactagaaagtgcaaaggcttcagtgttggatgagtgtggatttgaatcccagctgtgttgtggactagctctgagcttcagtctcttcctcttaaaatgggaataatagggtagttgcaaagtgtcattgttaattaggccctgggctaagttctttactcctgtgattttatgaaatcctcaaacagccctgtgaggtgtgtcttgttaatatctgtattttatagatgaggagcctgaggcacagaagggtgaagaaactggcctaagtggtagagcttttcactgaacccaggcctattagagagcagaggccacattcttcactgttatgcagtgtcatgctatgttatctgtccagacatgttacgattcctggcacacaggatcagagcaaatagtagctattattcttattactattattgttctaaaattcaggcctttcttcaccacactgacactgagtaatatatattgtagctgttcaataaaactttattggatttaattggttatgaattttatgtgtgggaaggtggttaactttcctatctgtaaggagaaatgctcaatagaatatcttaaaatgggggaagttatgaaaatataaaataacaaccagagaggcaaaccagtttatgagattctgtattagaaagctggaaagaagtttttaataagaagaatggaggctgggcgcagtggctcacacctgtaatcccagcactttgggaggccgaggtgggcagatcacgaggtcaagagttcgagaccagcctggccaacacggtaaaaccccatctctactaaaaatacacacacacacacacacacacacacacacacacacacacacatacacacacacaaaatagccaggtgtggtggcacgagcctgtaatcccagctactcaagagggtgaggtaggagaatcgcttggacctgggaggtggaggttgcagtgagcagagatcgcaccactgcactccagcctgggcaacagagcaagagtctgtctcggggaaaaaaaaaaaaaaaaaagaagaagaagaatggaagggtacaatctggtggtagacaccatttgaaaatattctgtctagcaaatagtgtttttgagtaaaagaaatagacatgacaaatcagttatgtggccatcccttataacaatgatgaacagataggagggtgtgcaatctttaaagtttagaaacaaatttgtccttctgacatccttcccttctcttgacacacggttggtaatggccaagattctgttttgcctgatggagttttgagtgagttaaattaggttgtcttgaaaatagctgggccagaaaataaaaaggttttctctctttggaaaggggctttactccagggaagaacacagctgtccaggaggaatccgggactgttgagtccagaaacttcgatccttctccaccctttccccagtgtttcaccagcagaaaaagaatgttattaaagtctgtgatgaaacaaagctgcacgctgagacgtggctgccagaacttttatttttatggttctcttgagtttggggagaaataattaaatgttgcaaatgtaaaaattggcagtaacattttccattttgccaatagtcattcctttggttttcccttggattttatttatttctttctccttttaggcattgctctgtcatagcctgcttgagtgttgtgtctctaggaaggccagaacaccaggtttggatgttacatagccaagaacattgtgtagcagtgcctggttttgccacaagacaggtctgtaggaaataccactgccactgcagccgagcacgttgaactgactgtgctcaggaatacttcaccagtaggcttactggaaggtatgtctttctgcatctgtgatttgcagaggggcatatgattgccttgctgttggaaacataggaaatatggtttttggggattctactttgaaataatggtactcgtcaatgcagtgggaaactacaatatcaggatgttaagaaagggttcaaaaggttttaggaagtcttgaaagataaatgcccattccaattgagccagtaggtcagtcttcttagggtttctgtgataatataggactttagagtggagacgcctttcctgacaagtctagggttgattttatgtatttgctaagatttattaaaataaaaaatggcatattctataaggaaaaataatattaatggtattttaattaagcttaagcaataaataatggttatcacataatttttatttattattctttaccttatttcagggtctgtcttactgtgaagtttcaataaaatgcttagaactacattttcctggccaggtgcagtggctcatgcctgtaatcccagcactttgggagaccgaggcaggtggatcacttgagctcaggagttcgagaccagcctagccaacatggtgaaaccctgtctctactaaaaatacacaaaattagccaggtatggtggcacatgcttgtaatcccagcaacttgggaggctgagacaggagaatcgcttgaacccaggaggcagaggttgcagtgagccaagatcataccactgtattccaccctgggagacagagtgagactgtctcaaaaaaaaaaaaaaaaaaaaaaagaaatacattttgttttattgcaggcaggatacatttcaagaggcttacttcaccttctctgtctgatctccgccaaatatcttggctttgtatttcccataacccatctgttcttcatgtagctgtgaaagaagtatatctttgaaagcagaattttgagtaaagaaacccgagagttagggagagatgaccaggttccatggctccttgttaatttcaccttcaagccacatactgcctcttcttgggcccttgatctactgctgagcatatctttttctttcttggtgtgaattctgcctctcagtataggtggtatttgttaatttaactctgacataaacatgggaacactgcgcctcagtgtcattgtctgtaaaatggggttataaggtattttctgacctacttaaggttaccgtgaggattaagtgataatgtacaaagaagacttttaaaaattaatattggagtatagtataagcatagtgacatacaatgaattataatcaataataaattgaatttcactttgtgacctcataaaatttgattcctttcagctctatcaaggacagcatcttgcctaatcactttttgttttagaaaagttagatgcttgtccaatgtcacaaagcaagttagggtagaggtagggcaaaagccctgatctcctgactcccacaccagcaggatgcttagttgtgatttctgccttgctttaccacttgggtcatctttcagtgaaggaggtaactatctcttctttcttgagttaaaataataccttagtagaagcaaagaacactatcactttagttcttttcagccttcatttgctgttgccttctgtgtctaggcgtgctgagctggcaggaaggtgacaagtatgatagattctggcctctaaggggctgtcaagtctagtgaaaggaggtaaatgagtaaacagatagacacttcggagcctgagtttctggtgctggcccttacacacagggtctatctgggcaagtcatgcctgtctttgggctcaggtttcccagctgcacattgaggtcctggactagatgtacagaatgatcgtgatcactgaggttccttctaatttgtcaccatctatgggtctgtgataatgcaaagctgtgtgcttgccagctgaaactgaaatgaaggaaagtgattaattcatttcacaaactgaaatgaaggaaagctattaatctgatggcgtatttttctttatttgtgataagtttcacagactacattttccagcattcaacactgccattgtattgtattgtattgtattgtattgtattgtattgtattgtattgtattgtattgtattgtattgtattgtattgtattgtattgtattgtatcatagatggcgatacttgttcagttaaccaaatggtcaactttgcaaaaatagcagaagtggacatctcatgatgatttaatacaggacacaaaaatcaatgctagcattaactactattctcggcctttctgcagtgtttttctgataggaacctttgtattaaaccaccttctttttttcctaaaaaggaccatagcataatagcagctagcatttatttggtgttttcctgtgtgataggtaagtgttgttttaagtgcttcccatataaaaattcatgtaatctttgcagcattttgaagtaggcattattatcatccctattttagagataagacaaccgaggtacaagaaattaagtaaaacttattcaagattacacagctattaagagatggaggcaggattcaaactcaggcggtcagcctcaggcagcctcatgtttcatggctggaccattgcctaaatgaaagctgctcactctcagcctattgagaacctggagaaactggccttgttatgaggccacaggctaagaaagcagttgtatcagcttacttgtggctctaaacttggccagatcctcaagtctaaggattcttactatgcacaggtgttctcagtctggattcatgtctcaggtgactcatgaacccttggaaattgtgtgccaaatgcatttatgagtccatgtgtgttgtgttggtatgacggggggtaggcggtttggtggttttctgcacagtatcagcagagcctctactctgtcactggcaggatcctagctgtgcaggcgtttgtcagcctaaatctaaatcaagattctgggctgggaattaggatatagctccccattgaacaagtgagtggctataggatcttggaagaaccaggctttccaaatgtcctcccaccccttggaactctgctgctgtggagcagttgtacgatgtccttttctctctttgaagctttccaaatctttcaatcttttttttttttgcctccaaattttggaacctcaaaatttcaaggtttttttttttaatttttttattttttttccttttgttttaccttctcctttctggctttgttcagaaatcaggtatcaataagctttttattactcatccaatctgtgagttcagtttcccatttaacttttatgaatgttttctttgttaagatgagtcctttcaaacccctgtaaagaatgtttcactatatacaaacataaaaacgaagtgttaaaactagaaaatccaagtggaaacacaaacatacatatacatttttccccaggcaatttagcttcatagaaattgagtgcatctgcaagggaatttttttttaaatgttattggtagttttgttatttgtattacctgtttggtcctagtctttatagttgattactctaggtaggtctttttaggactgaaaataggtcacacatatcacagtggtcccagtgttagagagatgataaaattctattacaaagtagttttgtcatgcttttggtctaaatgagtaatacaactagcatgtccagtgtcatttttgctgtactctggaaaacttttaccatctatctcatccttatatactgcaacaaacttctgatattatttcaattgcagttcaggcattgccctcgacacaggcttaagttcaagtctcagctctgttacttacaaaccatatgactttgagcaagtttatttaattttgtggagtccttttttttcccatacaaggggaaaacaataattacatgttgctcaaagggttatgaggagtgaggtcaggcatgtttatatgtttcactctggcgttttgcagagtaagcacttgataaatgatgctcgtgttattgattgtcatcatcatcattaatatgtgtaataggctaggtacagtgcttggcacatagcgggcactaaacaaatattttattggatttgattgtacatagcgcttgtgactgaatcagaggttgccaggggtagctttttgctcagtagattaacaaggaggaaattgttgaacagaacaactgatggctctacctttaagtcaatgaatttcatagtgaagtggtcttgaatgcaaatgatgaaatgtggcaagtctggtggagaaaaaaacccaacaatcttgaagctgttttaaagagtagcagttgcctagtcaccccaattgctgaaattttccttctcttccttgaataaggagtagagaggggcagagaggttactggtcatgttcattaattttctttcaagaactgccacatgtcaccagtggtgcccccccagcaccagtgctgtttggcagtcttctctttgccccagagaagccaaaatgttaaattgatggagcttactagatctgacagagaaattcttcacgtctggcctggatgtctaagtaaatttggtgtacttcttgtggtctggagcaaatgctggaagctattagaattctgaacaaaaccctccattcaaagactgctcgtttcctgctggggtaatccaagtatcaaacattaagaaatatgggcaaggcaaatgtggctgctcattgcaaaacccaccaaggtgtctacgacatctccccaaatgacttggaatgttacatccacttgatcatcttgaataagtggtttcttttgaaaacaagagctctacttttcctacaccaagtatagatgggaattggctgaatttcctcttgtcagtcaaatttaggagaagaaagctttcctccttcccttgaagttctagggacctagcctttttttttggttttattttgtttcattctcctttccttatatatttccttctgaaataaaaaaaagtatctttcattagatatagttatggatctattgttttagactaggcctgctcagtggctggaaacgattttattaagaaggctttatagagaagctttggtttatctcatgaaatatctgagtttgtcatagattgtttcctttctgtacagaaagttattttctgtgaaattccaggtgttcttttacatagacttgaaaggaatagatttgatagtccaggttttttttttccctaagaagaatatgttcttgtgatagattaattgaggatgaaatcagataacatagatgaaatcactggataggcatagtgaaaaccattattttaattaatctagctacagtgtttgtacagccagctatgcagctgaaggctgccatgtagtagctgctacactgtttggctcctgtacttatactgtatggggacctctttcttagacagtctcactcctgctggactgtaaactcctggagaacagggacaaagccttgttcattagagtattcctagtgcattccactataatagacacataattaatacttttaaaaaatgaacaaatgaataagacatttgtacagaacttgagtgttagaccaggtggtttcacaaaacaaagcgctcacggaggtttattggccttcctcctatgtctttgaccttttccttagcttgtgtctatgctgtgtttcctgtctacgagatggtggagatggcgagcccagttttctttcatcttgaaaggattcagctccattacttaatagtcccagtcatgttcctttccccctagaatctgtgtatgagatgtgaaatccatgaaaagataatgttgaatgggaaaaattaacctattttgatgacttttaaggagttctaactgtgcatgatagcaggcgactcccttgtcagtaggcagcaggcctgtgttatgtcaggggtaacgaggtggttcacttgtggagagttttctgtcttttcttccaagttatgctgacctcgccgacgaaaatattccccatctaataaaagtcagagcaaatttatgggcctgcccctgaccacttgtcctttatcctttaaaagaaaaaataaatctaggataagatccataggttactgttggaccatggaaatgatgggcaggggccaaatatcccaccttccttgatctgcttctcttttcccgattccggctgtctgggggatgctgaagcttgtggcatgagggttactgccgagcatggccatgtcgttagttccctttggaaacaagctgttgctctccctgcctggagggccacacgccttggcaccacactgaagagatcccaggcgtggctggagtgaagctgctaatgaaaaagcagccatggcaggtcaggacgaatcaagcaaaaaggaggacattctataattaaagattcagagaaatactagcgcagtttttgttgttgttgttgttgttttgtttttttgtttttgccaacgctatgacaattgctctttctacctgttcccgtgggttttctgtcattttatcactcattaaacaagtgtttattaaatctctactttctgtgtgctgcttacctgtgtgctgttgaccatagttcagggattacttaaagcatcaatgagtgtgcgatgactcaggaatgagtcgggtcctcaaggatcttgtcacctagtaagagacagagaaatatgaggcagagggaggctgggccataggatatggcaggatgcagagcaaagagctccagagtctgatagacctgggatcaaattcaggctctaccacttatgagcacatttggctttgggcaatttacttaatcttgaacttcagtttctaaatctttgattgtgcataatacacagcgtcctggaagggttgttttaggatttgaaataagctgtgaaaagggcctggcctagagttagcacttgacaaatggctgctcttattattttattatctctggcgaggtgctgataaccatgtgagttcaggggaggcagtctccaccccgtggacagaagtgagaggatcagcaaggggatcaggagtttcatggggcacatgcctctgcactgagcttgggagaatgagtaggatctgggaacgtcgtgaaggagaatagagaagaaactttattcaagacataggtttttacacattttgttttgtttttagcaaataggcacttattttgcatcatttttatttgcagtatgcaatcaaattgtgagattacttaagccttagcatgaatcccagtgccaacagttgtgtatttctttcttctgctttcttttgttgtcccccacaaccttctctgaacagcatctattaagtgattgcagagtctcatgacttggttgtgttggaatctctgcattagtggggacacccttccaattccttgttaggatcaaatgtgttttagagaaggtatctggttcccaagttctctgttgttttttggaaccatgaaagcctagagatgttatggcaggatgtccctaatatgcatggcaagccctcgacaatgattatggcagttgttactattactgattatttgtaacttctaataatccagaatttaaattggtcaaagacacgctgctcctcagggagtctgaatatactggtatcagcccagtgtccttccacactggcctgcagctcattgtgactgggccaactttggcctttgtgcctggcttctatgccaacctgccaagtccttgagatgctgtgcaccttactattttttgtcaggcctgctaagaagggggcttgtgtcctgcagatcaaggaccaataggaagccctcaccacaaacctgattcacagtactctctcctctttgcactttgcactgaagaatcatcctctcctccatacacattttttccccagtacagaacttagctttgtggtgctgggttattaaggaacccaacttgtatccactgtagttgtaatcttgctggtctttgtctgagttgcaaaacaacactcatggaagtcctcattcagttattctagagcacttgttgagctcctggtagaggcagagtgctgtccaccagatttgtgcctgatggcacagagaatgatcaaaaggaatcttgcaactggacatagtttctttagacagagacagaggtaagtaagtaacctcacataagtatcctaactcttattttccaaatgttaatgcttgactggcatgttataaagctaatttgtttatagttgtgccacataattatacactctgtacataatatgcttttgaaattattatttattgcacaaatattacaacagaaactgaactcaaaacacaaggaaaaatgtgtgtgggctcaccatttgtacgagtaaaacttttaatatatttgtgtgttcactcatagtccttatccatgaattcataacttttgcacacagtggaaatcatactgaagataccattgggtgttctgttctccccattctcctctccccatacaccataatattattcatgtatgctctcaagtttaatcatgtctgcatgcggacatttagctatccttagagagcccataatttgaactctgagcatctagaggaagctgctgcccccagcccacttaggtactttcttttccccttgtggtgagaataggaattaggtagcaagagttcccaggcttcattgtccaaggctatgttagtattttcatcataaatcttgaggcatcgcctattaaagcctttttgcctttctcattaaaagaagagaatttagaaggaaatatttgaaagactctaagatgcccaggagaaaggttccaacattattactctgagtagaccaagttaggtgtgggtatatattaatagtaactaaacacctagcagtttggtgtattctggaatgctcttgacttgggctgaatgtgtctgatgctctaggtgttcttgctgtctctgtctgtcatctgcctgtcattctcctgtgagggtaagtagtatcccttcccagactgaggatggaaatgttgaggggtgtaaaatgataactcaaacctttccaagagtccccaaagtgtgtacagtgcatatgaaattctccaaaaggagaagagggatctggaagtgccactgggagtgagaggctggggaaccagtggagtagaggatagtagtggcttgaagtcacagagcaagaattcaaaactttgctctggcactagcttggtggccttgggcaaattacttaatgtttctgaatctttccatgaggaagataattacattgcccacctcacttggttgtggtcggtattaaactggataatgcaaataatgcacttagcacaacacctggcataaataataagcactcaataaatgtgaaatgttatggttgttatttcctgcttcacattataattttattgctttccagactgatgtctccgaacttaggtagtagtggagtctgtgagctattttcagtatttcaaaatctatgaaaaggagacagttctggtcaccataataagtacatgacagatggagtctttgaaacatggtacccacaggggaagaatccagaaggggtcctttgtgttgaaaagttgaggcctcgagctgaggaagttagcaagtgcttcagtgaaagcttgtgggtttccagttacaatgggagtaaatagagggatgttgtgagcaaagaacttgattggttgctatgagagatcgttcccctgtggagcatcagaagttgatgcactctggagaccccagttgctctgtcatgtttaccagtttgtagaatgtgttatcactgccaagcaccttggaagcagtgagaaaactgccagacaaatggaaaccggtttctctacccaacttggtagaacatttgctccaggcaaccatacaggctccaggagacatttgccttgacagtgcctattttgtaaagctgtaatttaaactgacaaaacttgattttgacattgcaacaaggtctctgtagacttaacactatgttcattttcccatgcttatccctactggagactgatgggtttacaccaacatggaagctggttggaatggaaaccatccagaaaatgattagggagcttgaagctctctgaaactgggcataatgtgtattaagtcattatagttttaatgaaacttgtcttagctggggtctcttaaccacttgttttctagttgtaaatattgagtccctaatttacactaatgagatgctgttgagatttaacgccaatcttatactgcatttgtcaaagtgtaagagctaacctgaaatgtagctttgcaaaatattctattaaataaacttggtggagaagtagcaacaaacaaactgcatgctttcagcagaaactgtcaacatacacatctctgaagaaattcatattttatgccagggtggtctacagtagttcccattagtaaacggttaaatatcacccttccctggtaaatctgaatacttttgtgtctgttgtgaaatgctgtacacatcctcttttgatgatctgcctgggaattctccactgtgagaattgtctcttaaaaatgggaagcagcaaggcatagtagaaagaatataggcactggtgacacatatatttaggcctgagcccagctcccagttggtggccaggtaagttctttaacctccttttgcttattttttttttctccctgcaacatggggttggtagtacttatagggcagtgctatccaaacacttagtagaggtgataatgtaagtagtgaacgtagctcctgacatatagttggtgttccctaaaggatagattgaaagatatacacaccaccaagttgaattcctctcagatttgtccaaggccacccagcctttcttggccttttcttccatcattggttagtgtgtgttcttgaaggcagtctgattttatccttggcttaaaaagtggggaaatatttaggaagcctagcctaatgcaagagaactcatctatcttactgtaggatcaaatacaaatggtttttggattgtccattatttatctctcacttctcttcattagtggtgctaatggaaacacaattatcttcatagactttgttagtcacaatctcttggtttcttcaaatcccacaatagcaagaatatgttgtggtttttataatctcttttggttcctcaaacccaaagaaggacagtgagagggtgggagatgatttgagagggtatttacattcccaggattttcagatatatttatgattttatttttttggagacagtgttccaatagagaggtattctgtcttctcttttcttttttctcttctctctcctccccccaaatcgaggttgtaagtgatgtgagagacctgctgtgaactgctgtcaccagatcctgctatgatttctctttgttcttagttctggagtcatcaaggctacatggagacacgtaccttccactgatatgtttgctccttgattcagggctgagtgcctgtttgagtgattctggctacagctaaatgatatttctgtttccaatagtattgtaaactatagagtaagaattttcttgttgttgttgggagagtttgtttttcttcttagtgtgtattatctcccaccccactcctccaacccgttctttaaaaaacaaaacaaaaccaacaaacaaaaacttgcattgaagcaacacccagaaggagtgagcaggcctaggctggagtcttatcctgacatggtagaatcctgttactgtctcttcgtagattcatttaaattgttttgactgattcatgcaatctctcagtccattgatcaagtcaaaagaaaaagtatcactaaaaactcacaggactggtgcaggtagaatattctttatctatggaaaattcattatcctatctagaaggatgtcttgaaatagcagaatatttttattatgttttttttccaagtaatacatggttcaagaaaaaagaaattttaaaaagccacactaatagcaaaactaaaataagcatgaatcttaattttaacaaagattacagtagtccatgggaaggattgtctgcccattgcagtgggtttgattggtttttttacttggaagtgctcatattctggaatgtgtttatagatcttgaccttagatacttctcctgactcagaaattgtaaaatgttttgctagagtagccagtggtgagagaccgctactgctgtatgttgctcagggctaacctgttaagaactggtctcgtcgctcagagagaaccatgatgctgatgccagtttcttgtttatgtaaaaacatttaaaaatgggcaagatactctctaagtacaagatagttattattgagatatgttcatgaataaattaatgagagaggaacttgagataaaggaaatggaggagagaaattgcatttttcctgcataattactctcttgttttagaacacaagtagtcctttggcatattttcaaagtgtggtatgtttcacttttgtttaaacttgtcaaattctcaatgtaaaagccatttaagacttttttttccttcttttttgaaggttgcttcttttggcctcttaaagataattaagagctgtaatttgtgaggattttgatggcattttttggcagtggtagtgcaggacaggatacatgaatcatagcatctgcttattagcaaggtctcatagatcacttgtccaactttccaccgggtgctgagatggttggtctctgttatctgttcttcccacttctgctggatacattctgggaaaagaatttcattgatgagtgagctgtacttccacttctgaagtacaaaagttattaagctagggagcattttctccatttgacacctacaggccactcagtaaaaaagcaaatgaatgatgaatgagtaaggtccctgggctgcttcctacttcttcttagagtggttaaggccctcttgacatttttggaggatgataaatgtgtgcccttgaagtttccttgtccaggtcaaacagccccaatttctccatgatctttggacattgcttccacattttctctccttcttgctctccacagggcaagtttcatttcatcaatttttttttgtaaaatactgtaaagatatctgaatgaagtagaccaggtataatctgataagcatagagtatggtggagcatttcttttaaggttctgggtattgttattatcctactaatggaaccagcatttgctggaccttttggggccaccatgccttagacaggtagataatggaatggcatagagaacagcctgaagccggctgtcttggtttgaattcagacttaccatttatgaaatgtttgaccctaggcaagttgtttaacctctctgtaaacttgtcttcatttgtaaagtcaggggtaatcatagtacttatttatacagttattataaggagtaaataaattagtttgtgctgagtgcctacaacaatgcctggagtgaaataagcactctgtgttagcttttattgaatttacaatgaaaaacgtccaggtcttactatctgaagtgcagttagttttttcagcaaggctttagaattagacagggctatgtttaaatcttagctctgctgtgtgttttgggggaaattactttgcctttctaagcttctgtttcctcgtctgtgaaaagggcattaaagaataaaatcagttgaatttctgagccctaattaagaaccttgagggcagagccatggtttacacttgctttttttcttctttcttaactttacctggtatgccatgtttataatcactgctaaattaaaatagtaaatatttaaactgagttttcccttcagtctaccttgtagtagaaaaattaaatacttctatgttacttaaaactgcacactcacaagtttatggtggtgtattgattggttgttctgaagaatgtattctgcttgccaccatgaactgggcttcagaataaataggcttccttgatcacttctctcctcattaactactgtctggaatttagagggaatacaaagtctggtagctacattgcctactaatcttgcaaatggcctgtgaggtgggtaagcaatcaggtgagtgacaaaggttatagtcaattttcctggcactctgggatttatttttgtgtccttgaagttttaagcaagtgagttttgaggttgttgagaaagtgggagactatattttaaaatggtttatagttattaatgttttcaaatcttggtgggattttaaaggtgggttaagctgcgaaagtgaatgtaagttaaagccagttaaatagaggagtccctcgttcattctgtctttggtatgcttaggatttcataaattttatgggtttcaaaatctttgccttgttttgaatgtttctaataagatggagtgaagtggcttacacctcatgagacatggaacagttatccaggaatgctgcttggcacacatataaagaaagcactggtctattgattcataaaaaatgtgtgactgattttcctgggacatgtgcattattttcacagaagaatttcattttttacttcctcccaccctgtgcatcacttgcacacgtttgcaattcatcaactctgatttccaaaacttctgccccctcttcccccaaccacctccatccaactacctaaagtgaaatatattagatggagaggagggaaatttccttaaatgcctaatttttatgtctgtaaggggcatggtgaatttgagaaatggtctgaatgttagcccagatgactcaatgcaattatgaaacaaattggaagctgtttccatgaaagagtatgtatgcatgtgtttccacgaaaggggtgtgtgtgtgtgtgtgtgtgtgtgtgtgtgtgtgtgcgcgtgtgtgtgtgagaacatgtgtttaggtcagttctttcattcgttctctttcttcctcttctttttgtcgtttcaaggctatgttttaggttggctatacagcaatgaggttgcactacacagcctcatcccctaaagccaaaatacagcaagtagaagactgcttagctcatccagtgagaatctcatgtattatattcttacttgccattgagttgccagaaaaaaaataaatagctttgtcttagaaagcaataacttttctgcaatgaaataacattaaacaactctacctggtatgccatgtgcattgtttttcctttcttggaaaggaaaaactttcttagaaaacgagggcacacaatgattagcgctaactttctctttcatgtgtccaacttaagattttctagtgaggcagagttatttccccttacatgcttggtttaatggaaagggcctggctttcagttttgttcatattcagctaccaagacccaatcagttaataactttgcccagagttgaaagaaaaattcctctgggtacagagttaaattcctctgcgtgtggaaggccatagtggttaaaaagttaggcttcggagccagatcaacatagattcagatgtgcctctgctgctcaatgtgtgatgagggcaaattgctgaactcaagtctcaagtttcctcatctgtctgatggggatcataacgcacatcacctgacgttgtaataattgcctgacaatgtgtataaggcactcgtgtaagatctggcacttggcaagagtaaaatgcattttagcctatactttttactcttcatttgtaaaattgtggtaaagggattggccctggagggagtagggtgaggtggcattttcaggaaggtagcacaaggttacagggaggacaatagaaatgtacaggatggctgaagactcagtaagtaaatagcattgcttcttacagcaggccggaggagatctctatatttttctttattagagaaaatttaagggatattgatttttaaagggaagatttatattttaattttaaagaggaaaatttatcagctcctatatatttattagacattttgggggggaaacagtgaatgaatgagactggtcccatttgatgtatgctgtcaaagtttataaactatctgatgaattagtaagaacatatcaaacaagacaaagaggctcattgttaatgtgcgcaggtgaggctttgcaggctgcttgtgggtgagggtaaaagttttcttaacctcaagcctggattctgaccatagaaacattcctcctgagtgagtagtgcttctagagtgctttccttcaaggacctctccggcatctggctcaatcacatgccatctttttctcctttacatctgcttccttgccccactttggcacccagctaagtgtgggcagatggtgtggccttggggactccagaagggccttggtgtccttcagtagcatggagtgtatagcagggtctgcccgtgaaggaccagggaggtgaagggccttacaggactcatgtggaatgcttgtgaatgcattatttccaaatatccctgagtatttgcaagcgtttttatatacctttacttccattttgctttgacaacaccattaccattccttgacgatgaggaactgatcggaaataaacctaattgttatttgcttaacagtttcaagacctgcaacttgcagcagtctcctgacggtctctgtacattttctctgtccccttctaatctattcaccacattgtagctggagtgatttttttttttttaaacagaaatctgatcatgagctttcttggtttaaaactccttcacggctgccatttgcttacaggtttagggctgaaatccttgccatggcttggcttacaggactctgtgggtctagcctctgctgactttgctcctcagcaccaacctattcatctttcatccttccctctttccagaaaacctaaaggtggagccctgtctgctccatctgctgccctggttactctcatccagggcattcattctctttttataagtactgtgaggccttttcacaatttgttactactgcatagttatgtacttatttcttgccagtctccctcacaaggctgcaaacttcaggagagtgcagaccgcagcctgttcagtcctcatggtatatgaagcctgttgcattacaggtcctgagcctccatttgttgaataatttcattaattaattaaccaattaattaatttcctctaaagggtttgaaaccccaactattaaggcttatgttgaaaggacaatttaaaggaaaataaactgttagaagagggagagatagaagccccagaaacttggaatgagtcagatcttacagctgagcaggaacgcaagctttgaggaaagctttatttatttaaataggagtctcataaggaaggcagaaaaaggaaacccaagcagatgacttggttcctattatctgctgagaggaagctcatctggagtgatgactttttcctggcactaaatttgacctgaaaattataaaatgaatccatacagaataaaaaataccctcctgctcccattatggatgatgtcttctattgtagtttgccgaagggacagagtttgtgagagggagtgagttgagatgaggtggagatgaaagcctgtatataatttagagagaacttggggcaaactagaaagatagcctgtggtctgagatgagggccgatgccacagacatggggacccctttcctttctggcagcattttcctgtgtgtattctggggggccttcaaggtattctgtgacaaaagggttctctagtcagataggtttgcaaaacactgcgtattatatcctggcccacccttgaagttgtataatgcataccaataaataaagaccctgagaagtgagagtcttatagtgaagagatgtttagctgtttaatccaccatttttcaagcttatttgacctcagaaaacataatcatagaacttccctcaaaacagacctgagtaatgctaatttaggagttggagagaacaagaagtaccagcatgagatcaaggtagagaaactcaattatctttgtagaaacatttctactttgaaatagaaatagaatgatctaagctgaaatagatttttttgtgtgtgttttattatagtagtggttggagtaggggtccccaaaaagtaaggattaagggagtgaggatctttcctttatgaaaatggtatggacccgtgtcatttaatggagggttttggtggttaggaggacaggctactgggtgtgagttcagggtctaccatgttttagctggatgacataagaaattgcctaccatcacagtgcctccttcctcacctgtgaaatgtgggtaataatagtaatgactacaagagctcttctaagaattaaatgtgatgatgcatgtataatgctgagaacagtgcctggttcaaagtaagagcttaataaatgttagctattagtattgctgattaaagaatgccaaggaattaataagcatggaaagattggagccctttactcagagcaaaatctagaaatgtctaatagccaaaatattcttctcatggggccttttccagcttgaggcaaatgataatatgtttagaagctgatggggtaatagtttcccagctggagaaaaacctgagtcttcatacaaggagagagaaccacaatgtgtgttcctgcagtactgctgtggaagtcatgctgtatgcaagtacgtccaaatcaataatcataagtagccccgatggctgaacccaaagtctttctttataatcttttatattatttctttaaaagactctgcctgtaaaagaatctgaatctagtaaacttactcgtgatttaatttgagctctgtttgaggtgttggctctgtttgttgattatgccaggttcttttcggtttctaagcagttgaatcaagtgatagaatgtctggttttctagttgcttcatacatgaagttgcatatccatccatctatccatctatccttccatccatccatccatccacgcagtaaatatttatcagtcaagtactactaaccacttccaatttatgaagcatcctcacaaagcccccaaatgtggtttaaatatagcactaggaattctttaggcctctgaaagttacttatgaaaatgacggagactgttctgtcttattttcttatcctcctaatttacaagttctgttctgtgtacactgtgactctgtaagagtagtgttggagactagattaaatgtagatctaaaataccctgtccataggcagagataggtaaagaatggctaattactaaataattaataatagctggtgatgctgctggcccttatttgacctttacataagcacagctgcctctgggctcatcccaggggctatctttatcaacactagagtgtgataataaatgagtttctctaggaatttttctttttgttcaggcactgtctctgaagagtgttccatgggaaaacaatcctcatgatatacatttttttaatagataaaactttggcagatccattttcaaccctggcattcagacctcctaaaattgctatcagctaatagagatttaggatatagaaagctgggaaggcagtcaaattggttcccggccactaaggccctgcatgcataagtatcacatgagggctatggacaccaagaccaatcaggccaggcttttcaggaagctctgctcagaatcaggtggagaacattcttaagcagtagtcaattattattcttgaatattaatcacaattagtgcaaaagactacctcttgccactaccagaattattttgtatatagagatcttatatgagcatgggaaaatttattttttaaatgctactctctgggaaacaaagtcattcactcaccaggtgtttattgagttaattttacgccagacactttgctaggcctagtgatacaaggtgaatgaggcatggcattgcccctaaggaaatataaaatagtatagagtttcaacttaagtgtcagatccaatctattaattggtagtggctgcctggaggattgtgttggggagaattctgaggctttgtctggacacagtgattgattagaacaatcttccttgaggatagaaaggggataatggtagatgtaccacccattttctgtacctagtcttctgagagaccggcaggcagttgcagctccatatgttaggtactataggaggggatcatataggatactctgggaacacctaattctgcacatggagcagaaaatagcatcacaggcggttgaaactttgaactgagacctgaaaattagtaggagatcccccccggtgaataaacaagagaagtgcattttaggcaaagaagcaaagttggacctggaagcaagcaatggtaggatgtgttgggaaaggcaaattgttctttgtactgggaaactttgccaagaccagatctcactgaaggatttggatgttaggcccaggagccttggaggactgtgagacaacactaaaaaaataccgatccttgaaaaatattaatctgaaaagaaggcactgatggcaggcaccctttagagctctggcctctggtctgttctgttcaacctctatactgatggcttggttagacaaagatgacgtgcatgttgatcagattaatagaagacacaatgtttggaagttttgtgagcctgtgggtgacttaatctgaaaccagatgtctcaaacagcttgaacaattccaaaccagaggatatttgctagggaaaatataaattctgtactctggctgaaacaaccaattgtacaagagcaggatggaagaatatttagcctggcaataatatgtgtgacaagagttagattttggttacaaatgtcaccagtctacaatgtgacatgtccacactgagaaaatagtaatgatgggcatgaagagttctaaaaaagttctaatcatcctgtctccttctgtcatgggcctactacaaaaggagtgttcattttggtaaagatgttaagataaaaattagctggcatgagtccagaggaaaacatctaggctgaggagatattttggttgatgattttagggttactaaacccagaaagagaaaattaaggactgtcttcaaatattttgaagataatcagtagcctagcacttaggcttatgttgtatggagtgatgaaaaatgggtagacatttctggaaagcaaatttcagctcaggttctcaatgaagcctccaatgatgggagcttctttgaagtggaaagggcaaataataagtttcctgtccgagaagtgaggatgcagagaatgggttaacacttgttggaaagattgtagaagggatttatgtattagatattgtttgggctcaaaggtccttccaactctgagatttttttcattctagaggaaaaaaaatatccctacactgtactgtctttgaagccagaaaaagaacatctataaatttgagcccaacctttaagttgtgtctcttgttggggcaggtttcttgacttgctgtgatgacagtggagcctttctatccctcatctggactttacttgtaatcttaaaagtcctctctctctctttttatttttttaacatctccttcctctgttttctgggccactcactcaaagacaccccataaaatatttgcccgggaaagaaggcaccttccaataaaaatacctataacctggaggacaagacacaaaagccttatttctcagctctgagcttttgttaaaacctgtgttatgactgggtgaaatgagctggcctcagagaacaggccagaaaacacagggaatcctttggctgattggcatcctctgccattggtgactctccataacccatgttgttgtctctggccgccagcaccccatcagatgttttgccagcttgagttctgagtctgatttctcatgccagcttcatcttggtgttgctgaataaaggagtttcccaccatcacgatacaccttcccctgcccctaggagaaatcttcctccagagggatgggcagccatgtggctaaatgggttcctgctcagaggcgaggaggtgaggaagaacacagtgcatgtgctgagcagagatccagctcctactcctggtttcttccaaaacctgcctgttaatcacctgtttacattgccaagcatgcttgactgggtaatgatagtagggggaaaagcagtgaaaggaacatcacaggttttactcaagtggagtaatcccttcctgatttacaggcatttcggtggctttggtgcagacagagtggctggtctcattcttttcacaccaatggccagcagcccccagaaagcagttggactcttcgtacccctttgatgtcccctcttgggtgattcccacgtggagggtggtgccactgggcttggttgcagtctgccaccccaccttcccagttagcattcccacctgctgttcctggtgactcttggtaaagtcagactgttggtgcctgcacttgtgggtgttatgtgagggacacatggagaccagtttgctgtagtctcttctctcactggcctgccccggtgccatgatctgaggataccacagctgaaagggaactcagaggtcatcaagcctgacccctttcattttggcaatgaggaaacaaaggactaaagaggtgaaggaaattgctcaaggtcacgcagctagttggtgacagggactgcagcctcagccttttgattcataaaccagggatcctttttctctcctaggttaaagcattgcccttttttaaatgaatatatttatttattcagaaattcagcaaatatttattgaactgtgacagagatgaataaagtctgtctccacaaacaactcatagacctggggaggagacaggggattatacaaattaactcaatgtggaaagtgctggtaaatggaggtaagaatagaaggctattctttcccttctccgggaaaagtgcctgacttgtgttttggttatggtgtgtttttttttttgaggagagtcagaaaaggcaccaaggtaacctggagacataaaatagcatagtgacccaggaaatgggctctggaaccagactgccttcatgtgaatccaagcgctgctgctcacctgctgagtaactctgggcaagttgctttttgtgtctctaatttccactctaaaaatgtgaggaaattgataatacttatctcctagatttattgtaggagttcagtgggttaatacatggaaaacactttaaaagtgtattggcatatagaaaaaaacataatagctatcattattattattatttcaagagctgtatttgaatagtatgctgagtaatgagacagatccttatgtttcaatggtgaccaaagatttagaaatgttagcatagttgccagtgaaagatgctggttttgcttggggctcctagggaaaccaggcacgtagatgggaatggacgggtacagtctggaagcagtggatgagaagggatttggggaagaagaaagccagaaggctagcatttcttttttccttcatggttttatctaagttggggccacagaggggtgaatattgttctgttgaacaaacagggggatatggcagtgtctggggctttgggggatcagtggtggtttctgggtatggcttttgttctgaaggagcttccttccagaagtggggacgtgtgcccacagatgcctgtgccctgaagaggtgcaacaacgaggtttctcttttgggaaagaggagagagaccagtatcttaagatgttgtcatctggttccaattttctctcctcacctctttagcatctcttacctaattatttgcttcctgaaagcatttttctcccaagagtaggtgcccagagatgcccttgggtataggatcaatgcaaccgagcagattgattcctccaaacgtgaaccctcatatgttagatcagtggtccccaacctttttggcaccagggactagtttcatgaaaggtagttcttccacagtggtggggggatgcttttggaatgatccaagcacattacgtttattttgcactctctattattattacattgtagtaaataatgaaataattacacaactcaccataatgtagaatcggtgggagccctgagcttgttttcccacaactagatgatcccatctggggtgatgggagacagtgtcagatcatcagacattagattctcataaggagcatgcaacctagatccctcgcatgcgcagttcacagtagagttcacgctcctatgagaatctaatgccatcgctggctgatctgacaggaagtggagctcaggtggtgatgtgagcgatgaggagtggctataaatacagatgaagctttggtcactctcccaccgctcacctcctgctgtgcaaccccgttcctaacaggccatggactagtactagtcgtggccctggaagctggggacccctgtgttagaccatttcatatgggctgcattcttttttggaaaatgaggtggttgcaatgcatggttcttaaggtcccttcttagcacaaacattcttgttcttgggccctggtattatggatattatacacatggtttttgctacttgccagggatccgggaaggtctgtggcacccggtaatttataattctgctgaggcaaggatttggccagaaggagtcacatggctggtgagtcaacttagctgatcacccaatctccacactcagttcctggcacttactaactgaggttgcaaaggtctctgcatcttctccttcagaatgttgaaggttggctgctacatcattttcccttagatttagagaagaaaagtttttctactagagctcatatttctctcttcttccatagcggcttttatttaaactattaggagagaaaaccctccatactcgaccacccacctccacactggcacaaatccagcctaaatcagaaccgtcagctcaccctgagccgggctgtggacttttcttccaggcaggtgggataggaatgggagttgaagtttgagcaacttttgaattattgcagttacctggatatatgatgtttttctgctgtgtataaagtgggctagaaggatcctcactcttccacactctgtcctcctcccaaaagaatttcctatttgttcaaggtgcaggattgacagcccaggagaccttgtgtctccacctgggcaggtcagaccatggcctatgtgggtggcttgcagcatgtctgtggaaagtgggcacagaccacctttgagggacaaaggggcggttgtctgagggcccctttaggagctcaccttcctttgccctactatttcctgttttgttttgcgttttgggatgggggggtttggggatgtataggccatgcttgttcaccctgagttgctgtcctttcttcccataacaatgtctgaagaaagaagaggagggtgggcttgaaattgtgatggggctaatgcttattttgaatacatgaggtaattttttgggtttttgtttactttattcttgctgttgaggtataattaatatagatgaattatgtgtttggttccatcagtcttaatagtcatgtccactcatgaaactacctaaagcaagctatagaacatttgcgttatttcagaaagttcccttgtgctcctttctagtcaattgtactaccctgcctcccatccctactcccacacctctacccagaggcaatcactttctggcttctatcaccatagtttatacacagggtaattttaaaaagcgtgtattcactgcaacctgtgtaaatccaaaaagggttacagttctttggggactgtttttaaaaaaatcagaaggctggagctagaagcagctttctcccataccttgaacaaatctttgacaatgatgggcctaggtgacctgatctctaaaacaattataataataattcctaccacatagcagaaaatgataataatagctgcatactgttattgaccacttcactcttctgaacattttacttcattatcttatttaatcttcagaatgacaccttgagatgtgtaccattttttctattttaacacatggcgaaaccagagctttcagaggggaagtaacttgcttagggccacagagcagtcagtcataattcaaatcaggagcctttgtgtccagggctttaacctagagcaggcctatgagagacggactcttgtgaactgaagtagcagctaagcagaggtcattattattttaaaagcagtatctattggtcagagaggacagtcttcctttttttctattttattaccttttaaatatttacatagaaaaaaatctagttttcagaatgcttgacatcagtgggtatctgcaaattagaactgtgggtactaagtttaagccttgtgctaccaacaggaaacatgaaaaaaagtctgtcgttaagactgatgcccagctgggcacggtggttcatacctgtaatcctagcactttgggaagatgaggtgggaggactgcttgagcccaggagtttgagaccagcctgggcaaactccagatagggagatcccatctttacaaaaaaaactttaaaaattagctgggcatggtgcatgtgcctgtggtcccagctacttgggaggctgagacaggaggatcagttgagctcaggagatcaagactgcagtgcgctataattgtaccactgcactccagtgtgggtgacagggcaagaccatgtctccaaaaaacaaaaaaagactgatgctccttctacttgtttctttcccacagaaaagcattgtgatggatctgtaaatattatttataaatataaatgacaataaagtgaaatattaattgatataattatcagtgatataatttaaatttttatagctatcatttgagttcctaatatgtgccaagcatatgctcagcatttgacatatattatttcaacatataatgcataagagacattgtattagttatctattgctgtataaccaataaccccaaaatttagcaggttaaacccataaaagttcattatctcatatagtttctaagggtcaagaatccacatgcaacttggctgagtggttcatgagattgccgtcatgctgtcagctgcatctgcagtctctaaaggcctgaccagggctggaagttctgcttccaggctcactcagtgacttttggtaggaaaattccttgacatatgagcaaggaatccatgagtctgcttaagacatggctttcccagtgagtcatatgacagaggaggagagagagagcccaagatggaagtcacagtcttttataacctaatttacagaagtgacatgccatcacttctaccatatactattagtcatagagtttgactgtggtaaatataggagggactacacaaggatgtgaaagccaggaggtggaaacactagggctatcttgaaggctggttaccataggcattattagccccattttactgctgagaaatgcatgctcagagaggttccataagttcccaaagtcatctacccaggaagtgagcaggctgggatttgaacactgatctggtgaactgcactgcctgtatgctttccagaatgaatacccaatgcagagagtcctggaagaacgaagtgcatgcaaccctggctttgggtattctagcatgtttctgagggtgcccccggatggctgtttgctcacagatacctatctttatatagttagtatgtccctgaagagcagggcataaaccaaagatttgcaaattcaattcatttcagattcatgatggaagttcaatatttaagggacttctgcttatatcttcctgtatcacttggtgatttatcattggcttttaaataagcattcaggtagtggagtataccagtagtattgcaattgtgggtgaatgaaactaccctgaagggaagattttgtttttctcttctagagtaaatgtggaattcaatcttatttaaaaatattttgagatccaagaaggatactaataaaccatgtgaaagtctagttatgtttaagattctaggtggttggtgtatagatggtgttttcccagaccatcccaagccatcctggcttaccacatccagaaaagggcatttttatagttgcctccactgcaagaggacctgaccactgagatacatcttcctgtcgtgacctacttaagggaatttcattttagggaaagaattcaggaagattatatggtctgtagctggcctattaaaaatgtaaacatctatctgctttttaatgtccataccaagcaaataatcaaagttacacatacttctgaagctccttttctttggagatctcggactattttatagaaacaggaaaatgtcacctttctagtcctgtttaccaactcatttttcttattaatttgctaatctgtcctgcctaggttaagggaatttgttattcattctactcatttactcatttaacacttatttcatacctgtcctgtgctacatgtaataggtataaaattccatactagatatgaggggaaaaaagatgaaaaagactaatttcctgccctcagggagctcatagtccaatgggagattcaacaaagagaaagaaggttacaactcaaggtaatctttgatttgtcaggagtcatgcaggaaagagtaatttactctggttagggagtactgaaagatttatcttgggtgatgatggatctagaaggatgagggggagtttgctaaaagaagaagcaaggaagggaaatgaaagtttggggtggtggtggaggagtttcaggtagaagaaatcattcacaaaggcataaaagtgagagacagcctggtccattttggagcaagaaattgggccataattgatgtttgtatctctaccttccagagtctcagaaactagaatgtttttctaggactgttccaaatccaaatgttgtctacggccataccacgctgaacatgcccgttctcatccaaatgttgtatcatttatcacccaaaatatagtgtatgacaaggagctcaaaacttattctcaatgccatgactaatagtgttttaaaactatatttttctgcctggtgttcatcatgacccttggggacatatctgggacatgtcacatgggctcaccatgagtcaggtatgggaatgtcacatgtcaaactacttttgctaatcaaatacacaaaatgctgattccctcactgttcttgagatttgcagcagtcacaagttccagtttgctaagaaattctcctatgcctgattggttatattattgtttccatctctttgcatcattagggccctgttgttacaagaaacagcaaaataaaagtatttctcttttcgttgtggtaaattggaaataccctagagactgtcaaagagggatgtgaaaatatttcagaaatattatttcatgcctcctgactacaggatggtggtgaggactcctttgtctgaggcacttagagctgttgaaggtgtgttgcctggaaatgcacctcatgggaagacttgcaggtgtgagcggttgcctaggaatgtcatttcaggattggtaagtgtgatgttaattttaggtgtcaacttgactaggctaagggaggcccaggtaactggtaaagcattatttctgggtgtgcctgtgaagatttccagaagaaattagcatttgaatcagtagactgagtacagaatatctgccctcagatattcatgcctcgagtatgcatcatccaatctgcagagggcccggtagaacagaaagatggaagatgggtgaatttgatgtcaccttgagctaggacacttatcttcttctgtctgtggacatcaaagatcctagttcttgggcctttggacgctgggacttacacctgtgctaccctaatcctggttctcagacctttggactcagactacattataccactgactttctggttctctcacttggcttttggagatggcatattgtcggattgctcagcctccatgattgtatgacccaacccccataatgaatttctacatatatatatcttcttggttctggttcactggagaactctaattcagcaagtcaaaggaggaaagtatattcacctttagtttgtccctactacttagtgattttattcacttctactttaattcaataagcattcattaattcacttctaatggaccatgaatagtgctaggtgctggaaatgcaaagattaatggactatgattaagacacagttcatttccttgaatctcacaattgaataggggaaaaggtacaaggaacggttatactatggtgcaaagatagatgtgtacgggggagctgggcacttcgctgcatctgggagggcagaggaggctctgaaggagatgataacaaattggatctgaaaagatgagttaagaatctgtctgacccagaggtttcatgggtctttaagcacattaaggagacttgagtgtggtttataaggtatgatttgtacaaaaagcacaaatcatattcctgtaaacacttgaaagtatcacagtttcacatccatgtagtgagctgtaactatgtttattgtatatttattgtctattttacagatgtgaaagcctgagaaggcagatagataaatgttacttgccctaggtcaccaaccagtgattagccactgaggactgaaacccagtattttttttcttacagtaaaacccatgcttatggaagtccatactggacagcagtcttgggtttggctaagctctgccaccactaatgagccctgtaaactcggacaagttgccaaccttctctaaacttaggctttctcatctgcagagtggagggagtaggacttgaggcccttctagctatgcagtctgtgatttctagagacagaacagggaagggcaataggggtgacaggagagaccagaagctgccgtcacaaagactagctttatggcaagcctgtttcccaaaagcacaggcccttcagtggccagtgaaactgatgtgtttggatttatcaagtagctttgccaaggaccagctggcagaagaaagcaaaaagcagcacggcagatttaaagatgagttcatttctatggtgtcagccgcagagggtgcggtttccctgtctctagagtggtggacacagtctaccactgtgtttcttcgaggggagattgtgcatgtttcttcgaggggagattgactgtgtgcttaggcagtaaacatcttctgggcacagtgtcactgggaggatttttgtattgagagggcagtgaggcgtgaaacctcagactcctgtggtacttcctgctacccagtgatgtcagaggcttgctgctcacagtccccagcttagggccctgtttctccagctctctgcttacatcatgtgggagaggagcagcagccatgagaaaacctagctcctggaagtgcagagatagagactgggataaaagaggggggtaaaaaaagaattcattaaatttggccttgaagatggttatttacttgtttgctgtgcttgctaatatgccatatgaatagaaaagaggctgatttttgatgacaccatttcaagagtatccttcatgatgtccaggttaaaaggtttttgtgggtttcttaattttgttgtttactgactgggcgtggacatatggactcttattttttttctggttgcctttgctacatttacaggcttccgtgtttctaagaaacgaagcagctgtcttttcatcaattaatggtatcaaaagtatcggtaatctctggatggtgctatacaaagtgggtcaagagatatacagtggtccccccttatctgtgtcctgggaatatgttccaggattcttggtagatgcctaaactgcagatagtaccaaattctatatatactaaacatgaatttctttttccttttttacaatttcatgcatagaagattcatttttactgtagatcttagtgacctcagcatacgatttttttctttcctcattaagtcaagatctttttcaccttttcacttcaatcttttaccttatcactttatagtttattggcaaatccaaatgccagcatcactactcttgtgcttttggactcttagtaagtaaaattaaggttacttgaacataagtgcgtgatattgtggcagtcgatctgatcaccaagacagctactaagtgactcatgggcaggtagcatagaaagtgggaatatgctggacaaaggggtgactcacattctgggcaggatggagcaggatggcccaagatttcattatgctactgagaatggtgtataatttaaaacttacgaattatttctgcaattttccattccatattttcagaccatggtaccttgggtaactaaaaccatggaaaccaaaactacagataaggggggagactactatattctaaaagtttataagagaaagcaatttgatggtgatatcaaatgccattgcattgatctctgcaaaaacccttcccattcattaatgcattcctcatacatagacatatagcctcccatcatcttcacacaccacagacaccttacatttgtgcacttgatttttgtgaagctgatgtttatactgatcatgttcaggatggggctcctgtagcacaggggaggtttttgggacaggtgggtaagagaaatataaggaaggaagagcaaaaaggacttgattctttattgtttatacaccaaaaccactgccttatgcataatccctccttctgggcactgggtagtgagttggcaaagtgagaaagacgaaactggtagttacaaatattctacaaattgttagaataaacactggttttcatttgagttggccattaggttggaatctgcttggccaaaaggtcaaaaccctttctttggcaagagtgatgcatcttaagtgtactttattttgccaagtagactaaagaccttcaaatctttgacagaggtgtgggaaatcctacagcacatgttttctctcagtctagaaaaactcctggacgtggattacaggagcttttagatcttagaatgctctttataaaacatatttggatgacacatgacatggagaaagttatggcatgcttgtgttttatgtaagtatgtgatttgatcagggcttagaaaagtttatcaagctttttagatataattttgtaatctctcaagatagagatggcatttaatggcgggatagttggccaataaaggtcactggacaatttaacagaatgttgcattcttgtaatatattcttgttcttctttgaacacaggactattactcagatttagaaatactagttatctgcatttttcttcattgtctctgttagacagtgggatatagtattgtctttagtttggctacactgctgggcttgaaactgtgggtaaaggctaacactcacttaagaaaataaaccatgtatcttggtttcatgaagaagatggttagacctgagaaagaggatgatctctgttgaccaaggtggaatttgaagtggaggtagtgtgaagtcagggtgaggttttggcatgtttagtctcccagacagaaaagatgaaggccaagaattgatattcacacatctcgattaggtacctggcatatcattagcctttcttgaagtcattgattcacagactgggctgatagtgaattttgaggtgctctgtcaatctcttctccctgtcattttcccacgaaggaaccaagtctcagagttgagatcattaaccgtgaacatttaccagctgttaaatagatatgttctttgataactgttgaaaaattttacaattttttcttttcgtcttgattctaggtgccctatgattttctttctattttgtcttgccttttttatttgatttgatactgagtgttttgtgctcagaaaataatacccagtggtgtcttggagttggcatctgtgagattagaactatgacccctctaagttctggataccctctgttcagtaaaagggctcacaggtcgctagatggacttggaggtcctgatatccagcctcctctaagatgaacgcttccacctacagtgccctagatgagtggctaacccctgcttgagtctttcattcacaatgtgcttcctccttaaccaaaaaagccactcccatcattacatattagatttcatatcatatcatatttattcaatgacttctatcagattgttaaaaaataaggatattttgttaaaaaataatataaatataccctttctgaagttgttttgatagctcctttgatagcaggtggaatttttaaacaatggctttggtgcctggattgtgaggattttgcttggattctggtggcatttctgaaaatgtgactaatgacccctccagtgttctagaatctgtgttcagtaacttgaactccatgccatctgaagccttctccaaagtatgtgctgggtccctcctttactctgaaagatttccataacacttggtagacactaaagaatgcttcctccaccttctccttcattataaactgacttgttggacttaacagttcctttctcatctaatcaaggagctggattctgtttctcaataatgtaatcacagtaagatggtgatattggcgaagcaccggaaatgactggcaggacactggggaaaaactgactagtctacagtttccttagaagacagcctgaaattgcttataagcagaggggagcaggtcactgaaaatgtagactcgtgtgtgaacacatctaacccttgatttggggggcattggggggctgctttctggaaagccccttatgtatgccttgcacacccacatctcaccttggagccttatttcagatgcagaataaaaagaccagagttcgagttctgactctctattaattattagctgttgagcttgggtaaatcccttaatctctttgaggttaataataactaccccagagagctattaaatgtgtcaaatgaagtaataggtatgggaatgctttgtaaactctacaaggtcataaaaagtcaagctgttgttattaacagtattttctgtaaaattttcctggctattccagctctcaggattttgcatttctcttattcactattggtactgccctttggccctttcacgtattcatctgtgatgctggtcagcccttcccctggatagaaattttctctctagcaagtttatggctttcatatttttaattttgtactatttttaaaaatgtaaccttcgacaaaataaaaggatatgcataacatacataaattttaaagcataagactgttttagtcaacatttattgagaacctatgaaatgcttgacattgtaccaggtcctggggatacccagacgaataagacaacccttgccatgagacatctccctatctgagagtgggcacagatggcagtgttcatattcaataaacaggaaaaagggaagagaggcttttccacttagtgaaatcgaggctatgttctgaaagtgtttactgttttccacataaagtttccttgtttctcggttccttctttctttttcctaaaatgtaagctcaatgagtctttaagctatgtcttccataaatattttttgaacacctactgtggagctaggtacccaacaggacatcagcagcagaagggcagagatatttgtctcttttgttcactgatatattcccagacaatatctgctacatagaagtgcttaataaatatttatcaaatgaactgtcacattttattagttaatactagctgtcataactgataatccttggtaactcaaactcagcttaataaaataaaagtacatttcttgctcatgtaaagcccaacttgaagtagattgaatgaccctgctccatacagtcattcagggacccagcctgcagaggttctgccatcttcaacctgtgtcttctttagttaacttactgccaatctccagccaggagacagaggagagggaaggcgtggagggttccaaaagggcctttttggccggagctcattctgttgtctgctacatttagacaactggaggggttggggcaagaaatgtagatccttgctggtctcatcccagcaataattttgcatattgaaaggagtgcacaaatctttgaacagctggccatctctgccttatggacaaaatgccatttgttttctgttcacatgtgggtctttcatgacctgtgagctccttggggtcaaaggctatatattattcaattctgttatccctagttcctagtatagtacagcaggtaaatagatgttttctgaattgaaagtaaaaaaatcgtttttctgttggatgtcgggcaccataatagatgcttacatttttttttttggataaaggaggttttttttttaaaaaaaggaaagaataaaagaagaagaaaccatttgctataataaagatctgcaaagcatggtaccgggttccaggatggtaggtgttcaagaaacacatattgaaaaaaagggaaagaaaaagaagagaaagagaatgaaaggacaaaggaggagggaaagaaagaaggaaggaaggaaagagagagagaaaaaataaaaaggaaagaagagagggaaagtagaaaggagacagaggaaagaagggggtgaaagagaagttgaacaagaggaagaacagggaatgaagtgagagagggagagaaaagagggaagagagagagaacgagaacacaggaggttcctgagaggtaagttgtgtggcgccgtactcactgcagagggagtttttccccctgcctaggaggtcagggaaggcttcccagagagaccttgctctttggcttctgcttttcttggtccttctggcctaatttctgcaactttatgatctgcccaccccaatagaggacaaaaatatctccctgttgtctgatggggaaatgaagttaataaatctcctggaaagtttgtgcttctccatggaaacagtacataaagtactcctgccacccaccaagaagcaccgggacgggcaaagctctccatcacacaggacctgcttcttcaagcctacagtttctcaggccaggttctgtgcagcccagacacagttgttcagatctggggtgtggaccaggtggtgccagaggccctaagaatactctgtttactttgccttcctcatcagtctctttcattcctaactcactgagtttctccacaaaatccacattcagaagattttcagtaatttgactgactgtagcagcatacacagccatgagtatactgtgcccagatgcctgccagagtctcccgaccacaaacccagcacgttgatagttgtgtccttgccatatacacagtggaatcttttgccttttctttccttttgtgcctttaacattttcccctttgtatctcctaaatttgcatactttgtagcaattcttcaaaacgatattaatatgcccattttatagatgagggatctgaggctcagaaagtttcagtgtcttgtttatgctgcctggcatcagtctgaattgctccgagccttaagcccaagcctcttttcaacagtgctgcagccctgtcaaagatgtacttgtgaattcaaaacagcactcaggcatataggttacattggcaccaggaaacctaagcagtatttccatgaccaaattctaagtgaattcaacaccaaaggagaaaaggaaatgttctttgctctctgtatagattcctcttctgcttgcttgggttttacaaagttcttctaatttttatgtgcgattggacaatgcagttttggtaaagttgctaaaaccataactgttactcttggttttaaatatcaaaccaggtaaaagggagggaggaacttaatgttacagaagggaaaaatgacttaaatatccgaacagacaccatatgggaggctttttactcccctttcctcctttaaaaacagtgtgttatttctccctctagattccagttactatggagggatttaggatttagtgagactagtgttgctgaattagctttgtaagacaagtctgtttactttttatactaattttcatgcttaccactgactctgattagtttgaagaaagctatttctaagaatctgttcttaacattatagaaaggaaaagttggccgggcgtggtgactcatgcttgtaatcccagcaccttgggaggccaaggcgggcagatcacctgaggtcaggagttcgagatcaccctggccaacatagtgaaaccttgtctctactaaaaatacaaaaattagttgggtatggtggcaggcacctgtagtcccagctacttgggaggctgaggcaggataatcgcttgagcctgggaggtggaagttgcagtgagccaaggtggtggcgttgcactccagcctggacaacagagtgagactccatctcaaaaaaaaaaaaaaaaaggaaaagttaatgatttaattttctttagctgggcatctggtaaccatgtatcagaaggtgaagcctgtgaggtgccttagagagcatggaatgctgcccccatcccatggattaggaaattgaggtctgtgtaattaatatgaataattattaccatttttcttacattaaaatatattaaaaaccatagagaaaaagacacaggtgatctgcaattccatgtctaaaggaagcccctattaatatttttatttaccactcatctattttctattcgtatgcattatatattaatttaacatcttgctgtatgtatctgttttgaaatgtaatttaaaaaaaatctaaatatatcatgaacatgcctcatgttatggttgcattcttcatttatttaacaaatgataatcactaacacttaacatggctctgtgggccaggcattctcctatgcacattacaaacagtaactcacatatcctcataatgagcttctgaggtggtagcattattaccgtcatgttacaggtgaggatgctgaggcccagaggggttacataacctgcagggtcatgcagttaggaagtggcagagccagaatggtcacccattctgtatgacttttctgtctcccgggacctggcctggcccgctgtaagctagcaaacgtgtgtgctgaatgaatactggtgtttaaaagactgacatggtgcatgagaacagggtcttcctggtttggggaatggtgctgattcacacttggcatgtgtttatttcctgaaggttctacggccagcagagctctatcctgacaatgtttctgaaccaccgatcacctacaggtgtgcagaggttatgacacagcagttttacacttggccttgggagttgttgtccggttccccattatccccagtttacacactttcactaagtcaagattccatgtctgtagctgtaatagcagtgtaatagcactgtgctcaagggcctggagtgttccttgatgtgttttgggatttctagccaaatgaactcagtataagttcatctcacttttcagattctaatgatgtctttagagattttgtcctaaatcagtgaacagaatttgattctgagggaatttaatttggaaaaaaaaaaaccacccagatacatactttcctccttgtagagtaaaacctctctttattaatttttttttcttaaaggatacattagcccttttaattatatcttttgcttttctggggtccagcataacctattctgtatgggttatacatacttccttctatcatatattaatgaatacaactccctttagatggagattgtgctagctagtgtacaaactagataggccctgacctcaagaagctagcaagctagtgagaaagataaataaacaaagatactctgttctgtttctttatttatcctaagacatatggataaagagtaaacaaaggatacacgactctaaatactgcaatacagtatagtggagaaaggttgagtatgaacttgggaataaggaaatatctttttttatggtgacgttattgaaacatccaaaccatgatatatttaagttatattttcgatggttggacttcaaggcttttttgaatatattcagtttaagtctgcagataataggaaaagagcttatccttagctttaaaaaattctttgttcatagctatttaaatggaaaagaaggaagaattgtcatatgcaacattttaaatataattcatagtttcatgtgaattagtggaattaacagtaaccagggaaacttccgaaccttagtgtggtcagaccctagtagacaataacagaccttttttttttcttttaagagtcttgctctgttgcccaggcaggagggcagtggcttaatcatgagatactgcagcctcgacctcccaagcttcagtgatcctctcacctcagcctcctgaatagttgggaccacaggcacatgccaccatgcccagctattttttttttaatttacttattgtagagacaaggacccaccaggattcccaggctggtctcgaactcctggctccagcagtcctcctgcctcagccccccaaagtgctgagattacaggcatgagccaccgttgcccagccaaaagatgtggattataaatctagctccatcactagccacagctgtattacaatctgcattcagctgtgagttcagacacctgaaaagtattggcttaataagttatggagagttcctaaaactcatgttttaattctctcatgtaatgaaaacaggagataggcagtagacatttccatggaaactgacatttccatcccataatgtcttctgggacccagacaccttttctgtttccgccagtcatccttagtgtgtgcttctcatctgtagtcctaagtttgctgatcctccttctgcctcacgtccatgttcttgttagaagaatgagatgggcaaagtgtaggcacaagctgaatcagccctctttcaaaagcttgctcagaaaccctacctagtcacttcccagtccatctcatgtgccaaaaccatgtcacatgaccaccctcagctgccagggaggctggaaaaagctttttagctgagcacattgttgcccccaataaaatcagggttctgttaagataagggaaaaggaggggctggatatcaggtaggagtctactaatctctgccctatcagctgggaaataaacttaatcggcagttagctaacttttttgaatgcaccctccctgccttttcttcattaaatcttcacagacctaggttcagattaaagtatattttctttagttgaatttcgggttggagtgccagggatatttctcccttccactcccacttgatgatgtcattcatttgaaatatagttgggttcatttatttagtttgtcttccattttaggtttttttttttacccacttcactgattttatttatgtgtttgtctgtttatgtgtgaaacattcatatgttttggaagtcagaatgatacaaaaagaaatactcaaagacatgtccctctcatcttccttctgctcctttccaccctcccatcatttccacctcattcctgctcaccccatgtccataggtgctcagtctcatttgtttctggtttaactttactgtatttgcttttgcaaaatgtgcacagattatataactatatagctatataagcatatataaacataactatatatatctatatagttgtatgacatatagatatatttttatatatagatatattttctcattctctttttttcttacacagcaggtagcatactttagatattctttactcaagagtctatgtagatagttataagaaacgaaataatcatgagaccagggagaatgacaggtgtccagtaaaagaggtaaaaccaaacaatacaagggagagacctctgcttaggaaaggttttatgaaggaggctgcatttgagcagagtcttgagaatgggggatatggcaggaaagggaaggatttttctagacattgatagaagaggagaacagtcagggaatggtagggaagcggggccaggtcaggggcatcagttcaggggagccccatgatggagctgaagaactcaagtctctagggaagagtgtgacaagattgcgatgatacaggaagtgaaatctgagtgttgtgtgctttttgtggattacgggtttctagagaatttagacatcatctagtgattcattttaaactgacgttgtgtgcccatgttatagaggaggaaactgaggcccagataaacaaggatcttgctcaaggtctcatagccagatgttggcagagttggaagagccatgcccttgactcacagtcccaggctcttttcctcaggatttccccaggatgtaaggtggcccctgtgcttcatagacctggcagtttttcctttgccagcttgtgtctggacttctcaattcatttagtcccaagtctccaaatccaaccagactaacagcaactttaaaccagcctgttatgaattgaggtgtgtcccttcctccttctctttaaattcgtatattgaaggcctaagcctaactctttaggaagagactatatttggagatggggctgttaaacagattaagttaaaatgaagtcattagggtgagccctaatcctatttgactgttgtccttataagacgaggagattaggaaactcatccctacagaagaaagaccagtgaagatgcgaggagaggacagaagacagccatctgtaagccaaggagggaagcttcagaggaggccaacctgctgatatcttgatctcagactcctaatttccagaattgtgagacaaattcctgttgtttgattctgtggcacttggttatagcagccctagcatatcagcccatgccttaacctacattttaactggctcctcgtgggatcgcacacccaggctggtgtcttagctcctgcttgttacagctcctcatccttcctgttgttaagagccttccctgggccctatcttatgtcacctactcagccacactgcttcagaggcaagagagtagtggaggggagtttgtcttagtgcagagaacatggagggcagattgggagtctgatggagccactcactggccaagaaaataaattgcctaaccttctggattcaatagtgcagttgaactaggaatctctgaagccatttccatctcctcaattctataagcaatgtggacacaaactatttgttgattttaagtgcatactcagggatttaaaggtattttttaaaattatgctttttagcttttttaatattctcaaatgttttgccttactacagaccttaatatacccaggatattaacaagttttaaaaatcaggtgatgggattatgagttttaattttcttccttatgctttaagttcctctgtatgtgaagaaaactaatcaactttctaatgcagatggtaatgaaacaaagggtatacaagtttatattaattgacatatagcatgcagaaacggatgtagtttttaagataataaaatgtgaaaacactagttaagttgaggatggaaaaagctgtcacaagatatctataatctgttgtttgggtcatggcaaagcatacatggtaatagacatgcaccatcatggaaaagctcatcctattgacgttctagcttgaccttaggaagaagaaggtgcagataagagtctaacttaaaattagaaaaaaggaactaaattcaaaaattataaacaaaacaaccaaatagtctcataagaaaaatgcgaaaattttgctgtaatttatagctcaattcctcaagtaacaggaatttttagttacttaactcgataataattaacataaaataatgtacttgaggttattgggacttcatagatcagggaatatcataattattactgataattagctaaatgtaatcaaacggttccatttagaatgtttttaggtaatctggattcttgttatttcctatagacattttataagcaaaggtggaatacaacatgcttataatatggggaagaacagatcttggcaaatgggattgttttgaggccttgttctagggcactaaccaaaacaaactagatgaaaaatcatccacctctgtgaacgtttcagagtcaactgcctgttctacacaccctcagcctcatagatacgggtcctgataacccgaagtcctatgctttggtatggattacaggagtgatctctcctcctgtgtcctcttttgtagaaagcaaggatcattttgtaaacatctggtttcacctcagaagcgcacgtgctatcaagatttgtgtgtatgtgtgtgtttgtaaaagacattttatgtatgcctgcgaatgacctttccaagaatcttgcacagcttgtggctattcaggcctgttccatggatttttcttcaatgcaaatccagctgtgtcagttcccgtaacccctcctgtgcctgctcaaggttaagcgctgcagtctgctctttagtaagtgtccagagggtaattacccaggtgcatctgggtggggtttaacccctttcacccccaccctgtctgccagattcatgggggagattcagatgtgcaagagaggcagttagtgaaatcagttccctctcttggggtaatttgatcttgtcaaacaatgctttttacagaacatatgtgctttagttttattttaagtttctgaaataccattctccattttgctcaccactgaggcatatgtacaaatccaaagaccctcttttgttacacgtgaaactttattcttatttttttgtcaaaagaaaagtcctaagtttcccaaatccaaagcaaagtgaatgcttcaatattactttatccagagccacaggcaggagagaaaagttgtgaaaatcaattcaggaaagaccaggaggaaaacaaaatgatcgccccagaaatgaatatttaactgttgtttgttggttggatttgggagaagagaaggtaaaatggtttaaaaggcaaaatattaaactgcttagattatggacagctctctccacagctttcgcccccagatactttgggtctcatgatgctagaatatctgtcgtatctcagaggctaggacattctaggctgagagtggttgttataatattttgcccaggagtatggtgtgggagcagcacgttggacagggacttggcgatgttggcaaataataagcatggggcttgggcggccggctggtgattgcttaagccaggcaaattacttaagctttctgagcctcagtttccttctctgtaaagaggccattgattcccacctcctggggttattttaaagatgaaatgaaaccagctatgctaagtgttcagtgcttgccaggcacattacacttaagtggtagctgttattttattatttaaaaagatagctttgccacaaaccagatatgtgacattgagtaagtcaggccatgtaggtggctgggctgtggttttctcatataaaatgtgaaatttagagctatagtcccttctacttctaaagttcactgagcctttgaatcccctcttaagcattagttcactggaagaatagtttctgtgcctagcagtgtgcaaggttgccaaagttcagattaaattcttaccaggaggttactagaacttgaaacacttcttgtgcatggatttcaatgtaattaatcatttgaaaggtgaaaacatgtgttccaatcctgggcagtgacttatcccagtgcccaggtgagttactagcaaatcttaggtcttgggcagttctttttgtcctgataccaaagctagagaaataaatctgctttatggctcctcagtcttatttatgaatcaaaaaatcctttcatatccaaaatctatattattctgcatctgaaacttttctgatcttcttcactcctttacaataatattatctaatgcatagataatgcatggttgcttccagagtactttgatttatataattacactcacttgctcctcagaacaattccatgtggcaggtctgttatcacccccaattcacagataaggaaactgaaggctggatttgctgagatcatatagccaagagttgtcggatatgggttacatactcatgtctttcactgcaaaacacacatttctccccctgaagcaagctccctctaaagtgccagagtattttgtttatgaatgaggagtgacaaagcaaaaaatgaggtcacagttggaaataggatatggaaatgctggttccttcatgacccacaggctcagatctgtgattcccaacatctttttatatgagggcctatttttctttggtaaacagaagtttattattttattacacaggcaaaatacagatgtgcaaaagagaaatatgttaatactctggtgattattagtgttaacattttggtgtcttaacctcttcgctcccctgtttatgtatttatatgtatagggatgtgtattcaccagaatgttcttaatttgcacatactgttgagaacccatctttactaacaaaacatggtggattgcccacagatagttgtatgggatctagattttgcatctcccctgataggcttatcctgcctgcctcttgctgaattttgctagaaagttgttactaccaccttgtactacctcactccccaggggaaaactgcagctcagtctgcgtagctcctggtgcagcagaacccagcagtgccagcagccaggcctgatccggcccctaccatgaaagccctgacttctcccaccatgccaggactcagatgaagaatgtgccagggagtgggaagtggtgtctccagtggcctccatagctactgatacaatgcagaagtgcagggagttaaggcccacaggtgaaccttggccaaggggagatagaagcgcaggagactgttctgacccatatgtggtttccatatagcctttgtcttggtgacctagcaaacaggcacttttttgtgaagttgtgacagcttagtaactaatgcaccactctatatttgctctatcttgatgtctacctcacctcctcctgccccctgcgcacctgctttccaccctgggaaccccacccctgccccgataaagcttgagcacgaatacttttcctcagctccttcttttctcttttttaacttaggaaactgagctgatggtcattacatttatagtatctctgttcagtaagtacttacaaacaaaaattcaattgcttttagtgaatggattttattaattacaatagcatctgtatgcacttgaagaaaagtagtatattgatgttatcttcagatgccatttggtgataggtgaattaaaggattccttgaagccactctgtgcctctctctacctgcatgtcctcaagaagaagccacagttgggttgtttaggtgagatacaggtcatcatagctattttaccctcaacttgaccttcgtgctgtagttaaagactctcagacagaaacctcagtccatccagtctcttcctccagctgcctttcaagtgcgtgaagttttgaagtctgcacacgttttctcagggtgaggcactgtacacatctgggtcagctttattccagttttctttttttttaaatatataaagtcaatcagtgtgagtaactgctacatgagaccacggagaaaatgaaataaatatgttggaaatgctagaaagtgatctgcagttgtttattcgcctcagtctcacttcctggcttattttaaagcattcaaagggtttgaacaatcttttgagttgtttggcgtgctgcaaaaaatatggtctgttctctaatatgaaagaattttacactgtgcttcctggcctggaagtgtgtgggagagtgaggaaaacagggagaaactagtctcaagggacgggacctcttgtgctgattaacattctcttaacaaggcacttaatctattatataattcagtgcacttaatctatgaagcagtattcacggggctttcttttgtttctcaaggccagggatgctgtcttgtacatctttgcactctccaacagtgctacatttaacaggtactagctgcactctttgaatgatgaggtggttggtgaacttttcagctagctaagtcaattatggtgagttgcacaagatgcccatgttacaaagaataaatgctagaaaaatgatttatatatggacaaattactgaccaagacaatgtccttgtttgtacaatggacattgttcaggcagagctcatgggttgcattcacagaaagggctcattggctggtttaaacagaaaccaagaagagaggggtcaatgaaggcaggactggtgaaggaaggctgtgtccagggccttatagggatgaaaggggatgagacagtggacctatggactgtgaattctgagttccagtctttgcctcttgaaatttagtgtcacttttgaggcctgtcccctccaggaagcttttcctgatccctgaaccagttaactaacctcctatgaccccatagccctgtgttgggacctttatcctggtgtgctcctgcatggccatttgtgttcttcctgataccgtcctctagatactaagtcatgtctgtgagggctgcgctttttctggttcatccatgtgactcccagactgccttgcactcaggccactgcacaaatgcctgtcgaagtagacgttccaacccaaaggttcagaacaacaaggacgtgcatccagcctttgtagtgcagtgggttgaagagtgatgccctgaaaaagatgtggccacatcccttctcaccagccctgggctgcattctatttaacagttttggttttttacgtcagagaaaaagagatgacttttgtataagtcattgttattgactctgtctctctccaacttgagaactgcaggaagattatttgctcattgcctggccttcaggtgtctgatggaacaggaatcaaatcatagacactttgaacctctcctttgccatgatgcttggacaaaaaacttgtggcctcaattctttaactgaggagccttgtagaataacctctggagttaaacatacctgggtttgaacctcgactattactcatttctgtggtgtggcctaatctccttatgcctcagtgttctcatctgtaaaatgggcataacaatgaccacctcttacagttgttgttctgggcattagaatgatactctatccgttagtacaggggtccccaacctcaacatctgtccagggctagttaggagccgagcctcacagcagaaggtgagtggcaggtgagcgagcattactacctgagccctgcctcctgtcagatcagcattagattctcatagaagtgcaaaccctattgtgaactgtgcatgccagggacctaggttgtgtgatccttatgagaatctaactaatgcctgatgatctgagatggaatagatcccgaaaccatcccccccacccccaaccctggtccatagaaaaactgtctttcatgaaactggtcctcagtgccaaaaaggttaaggaccgctgtagatagtagatactgttggttgtagtattgtgtcattacgttgtttgtactagtgaaatcactaagactcttgttccagggaagagaagaaacaaaaaactgaaggaataaaaagtttaagccacaaagcattaataggaacacttggacctgtacaagagatatgctgaggggcatggggaaggaattccttccttctcaagctgtaggtgtcaggctttggccgtgaaaatgacagtggattttctactcattcagcaaactttctggaaaccccatcacctgccacgtgtgtgtggaggtgctgtgtgggtatacaaaggcgaattaagatgtgatcctgggtcagggacagtggctgccacctgtaatcccagcactttggaagaccaaggtggaaggctcacttgagcccagaagtttgagaccaacctgagaaacagagtgagatccccatctttacaaaaaaaaaaaaaaaaaatactagctagctgagcatggtggcatgtgtctatagttccagcaactctggaggctgaggtgggaagatcacttgaacccagaaattcaaggctgcagcaagccatgatggtaccattgtactccagcctgttcaacagagtgagaccctatctcaaaaaaaaaaaaaaacaaaaaacagaagacatggtcctgatctctactctcagggtttcatactctattgagggaagataaagtttattataatgcaaggagaaaccactctaaatgcagcatttacaaaacgctctgagagcataggggtctgtctgagggaagtggagaaaggcagagctattgccatttaggtcggatcttggatgagttaggagttcttcaggaggggtaggaaggatagataacatgtacaaaggcaaagcaatgcaaaaatacaatggtatgatgttggctgtgactggcatcttatgttatagggctggggagagacagttaagcagaacattcagccggagttgtatccttgacactgttgggctaagaggctgggttgccttgttttagtttgaggaaggctgtggacattttaaagggagggaatgatacgggctgttctcatctgatacttgtgcttctcttctccctgttcttttgagttggactgtggccacggaagggcagaggaggagaaatcttccagcagtcatggggagacacagatatcctttatcttagttgggattaacaaaacaaattaactttgggtgtgaggagaagcgcttcagataagaaatgggcaaacttggcgggggttgctgatagtgacaccacatcttccctgtctttacttggggaccatttatttttattttccccctctctttaaaagctgttgtatctctaggaaaaaaaaaaggctccaccttcaggaatgcagtgtggttttacttctggtaggtgaagaaaatttagcttctggatttttctatgcttgataaagggtatagtgtgtaaatgtaggaaacaaaactatctctaaccagatctcaaattttatgaaagaaacacaaaatatggatatattaatgtagaatagacatgtgtaatatacattgccctttgggttgcaaggtttttttctatatttctatattttcttctgtatttctataaatatatttctatattttttctgggagaaaaataaatcttaaatattttaaacaaaagttctcagtgagtgtgatctctgtactcaaccttggaaacaaaaacagatttcttgggaggaggagggataaaattgggggtatgctgtgtattttgggaagaatttggcttctttcttgctgatacctttcactagttgccgtaagattcaggtggttctttcattattcattctacatgtattcattgagcaactattcatcaaccagctgtacctttctggacaggcttattttggactgaaaggcattcccttgcctgtcccacggcctccccctgagattttcttagctgcgctcagtgtggccacaacaccccgtgattctgtcatcacctcccttgctacgaggctgctctagagccctccataaacaagctgtccaggctgtttggataagagcaggggaaagacaataataaactcgggaggatggcatgaccaaggtgattcgcactggaggtttttaatggctttttacacatgatgagcactttattgtctgcagtttaaaacgccgtcctcacacggtggctctgtgaatgccagcctctcccggggagccttccctagcagtgcagcctcaaattcagggaaggttctggttgtttcttctgtgaacaaatatcagaagttcctatgcctgtgtcaggagctctaggttaggtgtataaaagagatggctaagtttgggaagccgcattagtgtttttgtttttgtttttaaagttttaagattaaaaaaaataaattgttagacttcactagctcttgctttctccttttcagcactggctgaataaccagaacctgagctgaacttgagtattcagaaggtgaagcaaagaggaaaatgttttattagaaacaggctttctagctgtgacaaattatatgtgaaatttcaagtacagacccgcagggttgtgatgacttcaagaatgatcaagtgtggcccagtctaggaaagtggagggacaggaaccctgcgtgcctggtttattgtgtggtttcacttcctagggagaggaaggcaggaggagagagaaagtagcatgctgcagggtgctgctgagttcaggctgtggctgtccccagtatttcagctcatgccggtaatcagcaggcctccaggaggaagagttgggagctgttatgcaaagctgagaacctgtaagtcgaggtaggaagaagacagttcaaatcccttcggatgactcttgggcagtctaaagtctgatcccaatttatctttccagattgttctattaacctggccaaacaccaaatcttttgtgtacacatgaccgttggaaccctcttctctgcttggcaaactctaaaccctccttcaagaaccagttcagaagtgatcagtgtaatcagccattttaaaaaattggtttaaatctgtacccctccacccccatttctgcttcatctctccccaaggcagaatcagtctctcttctctgttgcttccatgcaccttggctgatggacactgttagaattgatgctcacagcttgggagagcagatggggtctgggagagcctcctgagttcactggcacaggatcatacaagacaatatgtgtgaaagtcagtggttaattgcaaagcactgtaccactgtgttcatagctaccctttattgaatacatcgtgcttggtattttctcatcaaatcctcacaacaaccatttgaaggtaggtattatagtcatctttcttttaaacatacaaaaactgagtctctaagaggttaagaagtgggctgcccatggtcacattaaatagtaagtggcaaagttacattaaacccagttctgactccaccatctcaacccatgtcaccatttttctgggcctgtgggcaatgcagacgtgagggagacctggtctttgctgttaaagcttctaatctgggatggagataaggcagtcactgccccctggtgtatagtctaaggtgggatacaggctctaagaagggtgcacataaaaagtgtttggagagcaataaagaggctttgtggagagagctttccttccctgcaccttgaggagtgggcagggtttttatagcagacttagagaatagggaatggcagaaactacatgaataaatgcttagtggagtataagaagagtgcaatggagagaagggtatgagactaaggctatcttaatcatatgactattaccaaggacttagagcccacaacatctcccaccctctgccccctatccttggtcttttatgatgggagatggttgctagcctgcatttagggatagctatgcttatacagaacttctcacacagagtagtactgcttccctgggtttggaagcatttttgattttgccagaaagattggcagggggtggggtggggtggatgcatgtgaagccgggggggtgtgctacaattggcacttggtgctccctgaaccaaatatactaaatatcttgtaatggatgcatcagtcctacccagggaataattctcccactccggagacccagtatctcctgtgtgggatcccccatctacaagtatacatgtaaactttcccctgggccactgcagtgtccctctgggaaacatgaatctgttcctggcacctctctagacactctagaatggttcagttgttttatccctatacatacttgacctccagaacatgctatttatgctactcccaaagcttatagctgaaaacaaacatttctaccctatttttcttcccttgaaatatcctctggctctgaggtcatttaaggaataggcagcccttgcagatttttgtaagtttcctcttcgcatgaacaataactgcaaaatgatccatctgatctggctaccattgttgaaggcaagaggatacaaagagcattcatcgggccaggcgccttctcaagaagggctcatcaaggtggaaaaccaagtggcacatacttgtggagaaagtttgaaaggagtaggggttaagggagtggtagggattgaggaaaagcctaataacatggtaataggagataacagactacaaaacccctgtgaaaccaggaataaaagagccccatgcttcacaaatacaagattgaatgagtttcatgtttaatgtaaatacacctgccatttgttctctgaagcactggttacaggttttgagataaaatagagttttgaacattgtgccagtgtaatttgcctttgcccaggcatagactgtacactttgttcctgaacagtccttagagacaacatagtgctctgatcagctcaaaggtcccacctcctgatgtgagacctctgcttccacctggcctgcatctgagactccttggctattgacagagtagggggaagtgagacagtggcccagggtgccagtgatctcatggctaaagtggatcattttactctcctgcattgaagttactcactgcattaagggtaaagagcaaaaccctcaatttctcctataaagccctggcctaccttttgctcaagtctcaccattctctctgcagttgctcaggcctactttcagttcctagactgttactgtgcagggtccagcctcagggcctttgctgtcctctgcgtgtgagcccttctgctcccttccccttcagctttcaattcttctttccttaagtcaacattacatattatttctttacggacactgtccctgaacccaacctcacagcagaagacatcaggtgacctcttacattggtcactgggcaccatactttccctgtggctcctgtcccagtttataattatacatttgtgtgattacctgatgaatgtctcctcttccactggactgtgaattccatgagggtaattctggcactcagtctaagcctgacacctggcaggtactcaaagggtatttgtttaagaaattaattattaaatgtatcacagatacatcagaagatgcaaataagcaaacaggaagaaaaaaagcaatcacagttctacaaccaaagaaaagccactttccattttttggcatatactttaaaattttttttctattctataaaataatatgattttcccttaatagtatggtaaacaggattaagcatccactaaatttaatttgccatcattttattcaaccaatcccctattgctagactcaaatcagatttgtatgatctattgtttcatggaaaccgatgcaaaattataaaaaattaaatcatttttgcttctcaatcagcattttactttatccaaaaggagtatatgatgagaaatcaagagtgactgtccaggaaaatggagatgtggcagatggagctgcagaccacgtggggagagccctggccacaggaaatgactgtggttggtagaggggaaagtattggacagttaaggagttgccacctgcccctggtggaggcaaatgttgttttgtggaaagcacgtggcataatgacagggcctctgcaggctcagtgatgtgggtgagcaaaatggctgtcttgggattatctaggagcttctgaaggcagtagggtggtggctaatttcttaatgctgctctcccatcctagtgatgggcagagaggatgagaaagccagctctggggagacaactgttgttccaaagtgaggagtcaccactacctgccatctcgcagactcttgtctagtgcccccttgaggccatgcttgttgttagccctgactcgggtgccccggcacctgccgtaaaccaagctagacccagattgcgtttgggtgcctggaacaggagaagttttaggaatttatgttagagattcaccatgttgtactttctgccaaagcgtccctccctgagtcagaatagtggaaggctgactatattccacccagcacgacgcactgaatgcttggtatgagcagcacatcatacgacaggaatctcacaacaaagcaatgaagtagttaccactatgatctccaccttatagatgaagtacctgagacttggaaagtgtcaaaaccagaatttgaacgcaggtctgtctgagcccagaccctttgctttttaaaccactctttatgaagaatctcagtaggttcttaagaacggggcgtggtactctctagagcgtttgtgacccaacactatgaattgaaacaaggcaagctctgtgctcccatttggggaaagttaatatttcacatgctctcgagaatttaggagcttggtaaaaacttactattaaacagggcttttctttaattccttttgtttaaaaattttcttgtgaaacactctatatactgtgcctccctctgagacgtcagtggtgccagagaccgttagggagtttgtgtaaatagagagagggccaaatgctgcccacacaagtagtgaggcatgaggctgagtgcgtggaacagttccatagctagccctaggctctgaagagtgtcctgagacctcatctgggtcccaaaatcggtgggcagtgctgtctccgcgagacaatgaccagcatgaggaaatacctttaaccattcatctttttaaaaagataagtttgctaagcaaataaaaccagttagccttgaaagttcagtattaatgaatgttaatgcatatcttgagattttctaaaaaactgacaaatcttccaaaagacaggaatatctagagggtaaataacaggactaaaatgctttgaaacatctttgaaatgatggttcaatgcacagggtcaaagggtaggactggttctcttcaagcattttaaaaaaatgcctcatttttatttaacattgttttgggaaggagtgcattatattgacacattgagaaaaaaattcctttttgtttttctaaaactaataggagcttaggcattatgattaaggaccaaaaagagccaatgccgatgaatgccctctttcttcagctgtaaaatttaatggccgctaccgagaggtttttcttttaatcagcaaaaaatttattttgtccttgacattttatgccaaaaatcagcccagagaatgtgttttatagcctgggctgaattcccctaaaggtagagttttcctatgagcagtgttcattgaattggctttttttttttttttttgcactagataactatattaatttattagataatctttttattgtttcagcaagatagaggaaacttacacagagacagcagagcataatgggtaagcatctgggttcttttggaagacgagatattggtttccattggccttgctacttcctgtctttctgaccttgagtaaattactcttccagagcctgtttctttgttcaattggggatcataatagtgccgccgtcatcatgctgtcatgattaatgcacctaaagcatttagcacagctgtcagcacttattgagtattgactaattattagcgatgcacagtgatctataacttaaagcttcgtctcagaatatgccttcttatgatctgatagtaataggaatcagcagaaaataaggtggttcaactatccgggaaaactaccaaatatccgcttagcagaggcaaaataaatgtagcttaaatgcagctgaaaatgctgaaagctgcttttgtttctcatgttatagaaatgcagttatttttattaaaagtgatgggaaatccatctgtaatctcctgtctttcttttatctgtttgtaaaaatagctcagtaaacccataaatgccaagaccctgttcagtgtgagaaacattgttgggcaggatgggaaagttcaaagaaatatcagatgcaatccctgctttggtggaatatttggtgtaacttggaaaattaaatggaaaaaaaattaaacaacaaaacagcacccagctgccaaataagtgaggaaggaaagacctcaggctgaagcactggtgatgggaggagggatttatttgagctggtttttcaaaggatgggtaaggaaagaatagcaggaaggcgtctcataggtatggtttaatggtaagagcaaagtcagtgtagtggcaaagaacaaggcaagagggtggagtggttagcaagtgaaggctcattaatgcttaaggctacctttgaaacagaagtgtctgtctgaccggattcaggaggcctgtccatcacgccattctccaccaccatgattcattactccagagtctcttatcttcaaatcaaaagcaagacgagaggcagatacagatatgaggaagtgctttgcttttcgctactctgccaaacatagtttacataccaacactgataatctgtcagcccacctctcctggacacttaatcatttccctggaatccactggaataatttttttatgcattacaaagtatgcttcagagtgtctatttcttaagataagtttgcattcctttaaccaagtggcattcccacaaagccccaaggtggcccgtgttacacattccttcttacagccaaagtggtcagttaggaaggcagctaccttcatggcctgttagtaagaatgttggacacttgttgggcatttactctgtgggagacactgttctcagtgctttacatgtccaaattcatttaactctccagaagagggagcagtaggagagaagggtgatgaacagaccctacaaacggactaaattattaaataatgaatcagcaattagttctaaaaatgtttatgtagtgcttactgtgtgccagacaccatgattaaaggacaatcgaagtaactcggtaatcacctctgaactgccagtatgggtgttttatcaccttccatgttctgtgttgacggtttattgaacacattttgagttcttcagggcagtgcttattaaattcagcgtgcgtttggatcgcctgggaatcatggtaaaatgcagattccgatttgaaagtgctgtggtggagcctgcgagtttgcatttctaacaagctcatgggggtggcgacgctgcacatccaggtgacctcttgaagtagcaagatcttagagaaccaagtaaatggcagaggaaatacaagcaggataagacaggaacatattgtcactttcacaccagaagaggcagtaggcctggatttggccccaggccccagtttaacatgatcattatggttgttgtcgctaccatgtgcaccaaaggaatctaagagcttggaaccttaaggcccaatggcacggtttacaatgctaacacaccttaaagttaaaggaagaatgtacgctatcctaggaacatgactgataaggtgcggcagagagagtggggtggggcgggtggggtgggaggctagaagtcaggaaacctgtgttctcatcagggctcatttacagacttgctatgtgacctagtttaatcactgagcctttcagtgtcccgatatcctcatctacaaagcagactggtaaacatctgctctgcccacccaggactgcagaagtgagacaggatgcacaaaagctcttgggaaaaccaaagaaacactgcaaatgtgcatttttataattaaaaaatatagagtctgtcttcagcagtaggcaggaaagagggggtatctcaggagctcccactttggtttatgtctctctgagggcttgttatgcttctcagcctattctgtattcaggagatgcatagagcttctggcttcatgctgtttcagagcagcccacttcagccttttctttaccaatagaaacccctagactatcacagcttgtccttcttgcactgaacccattaagaataaagaaagtctctgggctggggagtggaagtgagggacataacatttactgagtattttatgtgagttattttacttaatcttcacaacactcctaggaggaaggtagtctgaattatgaaattgttccaatttcatagatgaggcacctaaagctcagacaggctcacttgcctggggtttggttttgtttctctttgtaaaaggtaagtcttttcaatttagtaggtcaaaacacgtgattctctccttttcataagactataaagttagcaacctctggtatctggttaacagttcactttgtgcaggttattccagaggtagatagcatgagtttatgtcgaagcccaggattttgtgccaaacatccgtctctttgcaacagaattggagaattgttccagaattctttgaattcttaatttgcagaatttcataaagagttctacagctcacttttcctaggaatagaggagagcggcaactgaagacagcaggctttttctttttagtattgatgatgatgatgatgagctttaacacagcttatccaggtaatcctcatgtagtgctgtgatgttgatggttttgttacccatattttagagaagaggaaactagagacttagagggttaagagacttatacacagcctaactattccaagtgtttaggactaagtggactttagtcttggtttttccagctccaactctgagggttgtttccatattcccctgtattacatggattaaccagtgttagtgaccatccggctaagaaattagcagtggctctcagtggaaaagagctacttgattctaatgatagtaataatgaaaacaactgccagcttcctgtgctgttggtagggcctcctgggttggccctgtcacatcccatcatgtcacggggcatgtgagatcacggggctgaaataaccctgggcgactgatgtaaaacagattgcgtgtgacacctgcccttgggcttcccagcgtggcacttcagcccctcttggctcagaaagcatttaatatacccacagagtgctgggttcccccccaaaactttctgcaaacttccttgtaactctggaacaggatcccaggccatgtggaatcttgaaaaggtgattgacactggagacgcaaggtcctgttggtttgggctggttactcaatgtctttgagtctcagtttttcacctgcaagtgggaataaggatagtactccgttctctgagttgtgagggttaattgagccagtggtgccagatcacagtaggtacccaggcaaagaggattgttgtagcttactttcttctggattacatcatccttaatttttctctttccctctcctctcagaagtcatcacaaattctgacacttctaaattatgccttaagcctatctatattgtgtctagctaccaccttagtctaaatcagcttcacctctagcctagattactatactagcttcttacctggtcttctgcttgtactcccacttgacagagcatctagagtgattttattaaaatataaaccagatcattcattcgcttttgtaaaactcttcagcggtttccaattgcactttgaatcaatctgtaccccttaccctgcaaactgccacctgctgtggtccctgcccacttacccacctccactggatgcccctcgatacccagctcactgtgcctcggtcatgacggccttctttttcttccttggatgcaccaaaaccagggggcctgaggacctttgcatgtgctgtttgtcccctttgcctggaatgctattctccaagatctttgcatagctggaaattttgtagctctaaacacggggttcttccatttcataagactataaagctagcaacctctggtatctggttaacagttcactttgtgcaggttattccagatgcagatagcatgggtttaggttttcatttagagaaccacctgacctctccgtagaaactcaccacattctctcccccagtgactttctaacacattacagtgttttaattttcttcatgtactcagcactacttgaagttttctcatgtatttgttgacagtttatctccacccactagaaggtaactctggccagggttacagcactagttctaaccagtgtctgctgtataagaggcactcagcaaatattgattgattgaatgaatacattttttattatatattaaaaataagtagaaatgaatttttaaaaataagagggaagtctttcaatgtctatattcaagccgaggtttgggatccagtggccatggacaggcctgatgggaaggggtgggtggaagaatcactcgtcttcagagcattgcggtatggtgagagaccatctcatacagcctactgcctcccgatactttcattcactcgttcagttatttgaaaagagctcactgtgtgctgctctatgtgctgaactctgggctcatagcaactaaccatgaaagacctggctctgcctttaccgagcttaaagtttgacagtgaagactggcactgagtgcaagaattttccattgaaacaagtatttaacaagagagcagcacaggagggcctgggagcattttgtaggaggccctcttctggaggatcagggagtcatctctaaaggagtgacatctaatctaaatctggagaatgcctgaccctgtccacattttctcatcagcccttgagaacggtggaaggttttgcggattggaccagcaaaggggatgcttttttttttttttttttttttttaagaaaaaacttcctccacccagatgacacctttttctttctttattttttattttttatttttttattattatactttaagttttagggtacatgtgcacattgtgcaggttagttacatatgtatacatgtgccatgctggtgcgctgcacccactaactcatcatctagcattaggtatatctcccaatgctatccctcccccttccccccaccccacaacagtccccagagtgtgatattccccttcctgtgtccatgtgatctcattgttcaattctcacctatgagtgagaatatgcggtgtctggttttttgttcttgcgatagtttactgagaatgatgatttccaatttcatccatgtccctacaaaggacatgaactcatcattttttatggctgcatagtattccatggtgtatatgtgccacattttcttaatccagtctatcattgttggacatttgggttggttccaagtttttgctatcgtgaataatgccgcaataaacatacgtgtgcatgtgtctttatagcagcatgatttatagtcctttgggtatatacccagtaatgggatggctgggccaaatggtatttccagttctagatccctgaggaatcgccacactgacttccacaatggttgaactagtttacagtcccaccaacagtgtaaaagttttcctatttctccacatcctctccagcacctgttgtttcctgactttttaatgattgccattctaactggtgtgagatggtatctcattgtggttttgatttgcatttctctgatggccagtgatgatgagcattttttcatgtgttttttggctgcataaatgtcttcttttgagaagtgtctgttcatgtccatcgcccactttttgatggggttgtttgtttttttcttgtaaatttgtttgagttcattgtagattctggatattagccctttgtcagatgagtaggttgcgaaaattttctcccattctgtaggttgcctgttcactctgatggcagtttcttttgctgtgcagaagctctttagtttaattagatcccatttgtcaattttgtcttttgttgccattgcttttggtgttttagacatgaagtccttgtccatgcctaagtcctgaatggtaatgcctaggttttcttctagggtttttatggttttaggtctaacgtttaagtctttaatccatcttgaattgatttttgtataaggtgtaaggaagggatccagtttcagctttctacatatggctagccagttttcccagcaccatttattaaatagggaatcctttccccattgcttgtttttctcaggtttgtcaaagatcagatagttgtagatatgtggcgttatttctgagggctctgttctgttccattgatctatatctctgttttggtaccagtaccatgctgttactgtagccttgtagtatagtttgaagtcaggtagtgtgatgcctccagctttgttctttcagcttaggattgacttggcgatgcgggctcttttttggttccatatgaactttaaagtagttttttccaattctgtgaagaaaggcattggtagcttgatggggatggcattgaatctgtaaattaccttgggcagtatggccattttcatgatattgattcttcctacccatgagcatggaatgttcttccatttgtttgtatcctcttttatttccttgagcagtggtttgtagttctccttgaagaggtccttcacatcccttgtaagttggattcctaggtattttattctctttgaagcaattgtgaatgggagttcagtcatgatttggctctctgtttgtctgttgttgatgtataagaatgcttgtgatttttgtacattgattttgtatcctgagactttgctgaagttgcttatcagcttaaggagattttgggctgagacaatggggttttctagatatacaatcatgtcgtctgcaaacagggacaatttgacttcctcttttcctaattgaataccctttatttccttctcctgcctgattgccctggccagaacttccaacactatgttgaataggagtggtgagagagggcatccctgtcttgtgccagttttcaaagggaatgcttccagtttttgtccattcagtatgatattggctgtggttttgtcatagatagctcttattattttgaaatacgtcccatcaatacctaatttattgagagtttttagcatgaagggttgttgaattttgtcaaaggctttttctgcatctattgagataatcatgtggtttttgtctttggctctgtttatatgctggattacatttattgatttgcgtatattgaaccagccttgcatcccagggatgaagcccacttgatcatggtggataagctttttgatgtgctgctggatttgttttgccagtattttattgaggatttttgcatcaatgttcatcaaggatattggtctaaaattctctttttttgttgtgtctctgcctggctttggtatcagaatgatgctggcctcataaaatgagttagagaggattccctctttttcttaaaaaaaaaaaaaaaatagagtagcctctctgaactagcagcagtcctggggggatgttgatatcctcattttagacgaggaacctgtggctcatggaaataaggtgaattgttcatattcacaccactagtaattggtgggttaggcccatgtatccatgactcaaagccccatcccttttcagacaactagaggtgtacccactccattgcaatcatgaggaatttaagtttcaggacattccatcttgcttcttttgtttcctcaacgactaggcctgttctggatttttaggagttaaaatttggttgatgctcttttcaatcctaacaaaatatctcactatccatagtcctttgcgatccactgacaagtgagaaaccaaaatgtaaggggttccctttttttttttttttttgccagccagcctaatgatttggcatgctggcaactgcgtggttttgaaccgtgaggctgctctgagtacctgcatccttgtcctcatggaagtcaccaaaaccgtttgtcaaatggccaattccatcttatacagggagtcggggaaatgctcatgaaattgatcttgaagcacttggcaatcgcaagctccataagaatcctgggtaggagtaattaacttattttggaggacggatttacttaggaaagctccaactgcaatgagggtgggcccttttcttgttgctcctggcatgtgctcttctccaagtaacatttgcagcagtctgggtggtttgtctgcttagagccatccagaaaagttggtgggaaaagccaagaggccattggcactcagagactggggttggcaccagtcacagtgagaagcattacttttattagcaacttagtcattttacagcaggcgtggcagaagtgcctcctatgcagacgcaagacgctaatatggttattagggtaagaggagcagatatgcccagtatcccacaaaattctcaaattataaacatagcacacctttcactaatgtggtgataagacttagcttatataggcttgcatcctgaaaaacctgctctcagtctctcctaggtcatggctgtggtgtttgaatcctaattctgccattactagctgtgggactttgtcatcacaagactagcttccctgttctcatctgtaaaataaggatgttaatggcatctacctactagaattgtttcaaggaataaatgggttaatacaaataaagctcttagaacagtgcctggcacttagtgctcagtgagtccttgggataaccctctagagaggccaagatctgggctgtgctgcggactgctctttaccttatcctaacaatgaaaggacacagtgtgccctctgtcaggccctgttacaggccgaagctcataaaagtcagagggagaggtttggaaatttaacccagctggggcatcccagatgaaaaggattagtatttaaagagccgttacagtttatactagcaaacacacaaataggcagattgacacttcctgcctcagggatatggggcttccaccctttccagactccacaatccgctttgctgtgtgttttctctttcttcccttttcttgtttaatataatgtttgcttcctttgcccatcagtaagcactgaatattggacatctatcctgtagaggactgggattgctggtgtgataagtcatgattcctgaccttggggaattttgcaatgttacaagcaagctgggaaatagacacgtatgtgtgagcatgtttaccctggccaaatcccatttattctttaaatcccatctcaaatatcacctcccctaggaagctttcccagagttctcctagcagagtttcagttctctctctctctctctcggttgctttcataaaactttgccttttaccttattggagatgtgattgtctgcttctctgactcacatattagattaggagccccttgagggcagagaccatggaaaagcagcctagagggatgttatatagttcttatttatctccatagcttctagtacttggggatgcagtgtatgcttattggtcaaaatggtaaataaatgtaaatggtaaataataatagctaacactgagtacctcttgaaaagcagttcttattccttctctgctgtaatgataactaacatttactaaaggctttcttttgttcagtatgctttttccttcagtagctcatgtgatcatcctgccttaggaggaagtataattaacagattataaatgaagagactagaggcacaaggaggttttgggtaactcatgctagaattcagatccagcaatctggcccagaacctggtctcttaacaactagattaatctgcctctcactgtgagtctgtagacagagtgttaggacttttttttattattattattatttaagttctgggatacatgtgcagaacgtgcaggtttgttacataagtatacacatgccatggttgtttgctgcacccatgaacccgtcatctacattagatatttctcctaatgctatccctcctctagccccccacccgctgacaggccccagtgtgtgatgttcccttccctgagtccatgtgttttcattgtttaatgggttctcctctctcttactttaaaggcagggattccggcttattggactctgctgtgaactgactaaagtcattatctgttcaacagtggtcaggttctttctggtgggtttgggaaccacatttcctccccagcaacccaagttacaatgaaagcaagtcataggctaaattattcacaagtacaagcatttattagccagcaagcataaaaatcatcgtaaatctcttttctttaggctccaagtaattccttctttctgtccttgagccccatgaaccatccttgcataaaaaattcaggataagacaagcataatattctgatatcagggttggccagtcttccagctgcatcaggtggtagacttactgggtgggacacacaagaccttacagaagtttggacctaggtacgactcctcttgttcatgctagagtggagatgcccatatgatgttgtaagccaatcatatttcctgaccatcgctcattttatgaatgaaaaattatttctaatgccccatattaactgatcctcattaatgactcctcaaatgcagatttagatagcaatatgtgaagtggttacagtttcctcctttatattcttaccaacttctattcacatgtgtgaattcctaattagtgtacttgaaatgttaataactatggcagggatgtaggtccctatttaggctacacaaatgttaactatccatcctcagagttagattaaatttaacttagaaacacacatgttcatctcaatatcagtactcaagagctttaaagtaaatcacagaaggccggatgcagtggctcagcttacgcctgtgatcccaacacctggggaggccaagaaaggcggatcagttgaggtcaggagtttgagaccagtctggtcagcatagcaaaaccccatctccactaaaaagacaaaaattagctgggcatggtggtgggtgcctgtaatcccagctactctggaggctgaggcacgagaatcacttgaacctgggaggcggaggttgcagtgagccgagatggcgctaccatactccaacctgggtgacagagtgagactctgtctcaaaacataaagtaaaataaagtaaatcacagacaatataagcagaagtgcttagaggttgtgtagaacagtggaaagaggtgtacgtagctctgaggtcagacaaaatgggttcgaatcccagcttctctgtggcagtgggccagtgaccacatctcagaacctcgagtacagtagtcttcctttatccaaggttttgctttccagggtttcagttaccctcagtcaactgtggtccaaaaatattaaatggaagattccagaaataaacaacttctaggtttaaaattacatgctgtcccaagtagtatggtgaaatctcacgccttcctgcttagttctgcctgggacctgcatccttcctttgtcctgcgtatctaagctgtctacaatttctagagcctattagtcacttcatagccatctgggttatcagatagatcctcacagtgtatactcatcttggtatcacagtgcttgtgtttgagtaactcttattttatttaataatggcctcaaagtgcaagagtagtgatgctggcatattactatgttctgttttattattagttattattgttaatctcttactgttcctaatttataaatgatactttatcacaggtatgtgtgtataggggaaaattgtatatatagggttctgtactatacatgatttcaggcatccactggggtctaggaacgtaccccctttggatgaggggaaactgctatactcatattatgtactcataataatgcctaccttacatgcttgcagtgaggattaaattagataatatttataaagtacctagctcaggggctggcactgagccatcgaatacataaagccagtattattaacctcagttactggcctgtagcaagatgctcaatagacctgaggagaatgagtgaaggggaggttgcctggcatgggaggaagaggtggaaaaggtgcaggggtgatagataggattcttggctggcctatgggggccccagctgagtgggaatggagaggaagtgggttgatggagtcccattgtgtgcagaaagaggggacctctgcttgggtggaaaatgaggaaaaaaggcagcactcaggtctcggcaagaatagcccggcctcccttccttcagcccatcttctgaactagaaaaaggctgttgggtgctgtatgagaagtgaggcctaccaatgagagtcatcatcatgtaaattctctaccatcctggcttggtcggtagcatttctactgcccccaaagccaaggaagaatgatgcccctgatggttcttcccatttagaaggaactgcagtttacacacattaccttacctgattctcagatgtcctcaagtgatgttatcatgatctatcattattttccctgctttatagaagggaaaacagtcccagaggaggtaggtgactcctttagccagtaagtgacagaggcaggatttgaacctgcatccagctgatcctgttgctcttgctgtagaggagaggcagtgtatgggtattctcccagcttgcttggtattcattccactgatttttacctggagcttgaagactggaactgggtggtagaatggcaggtgtagggccagagctggtagagtgggtggtgacagttctgagccttctttgcccacctgtctgacagccctttatctctgtaataattgccaagagtcctgaaagatgcctcttcccttcccagttgcaaggcctgagattgagcccagggatcttgccagccttaattgacttgtgttgaaaattataagaactgaccctctttttaattttccctaaattaaacactgtggagggatcaaatggaaaatgaccaagagtcctgagaaaggattatccatctggcatctgatggaacttgagagacagggcagcatagtagtggtgcctgctgcatcttatagctgtgggaccttggccaagcttctggacctttcacagtgcgtttcatttccttatatgtaaaacagggttaataattctggcctcagatggttgtgacagtcattgagattctccatgttacttgcatggtactaggcaggagcttaatcagtgtccctttacatccccagaagtgggcttaaatagcccagtaggagtatgaaaccctcaatcaaatgtctggcatataataggtgctcaataagtatttgctgaatgaataagcatggttgctttgctctctttcgtaagttttctaactccatcgcagaagggttaagagaccattaagatcttgccatttcttgggcagagatactaacatttattgaacaccaactgctttgtacgttttatctaattgcaacaattctgaaaatctttactatgcctgtaatttaaatgaagaaattagggccttgagaggttcaatgagaaaaccaaggtcacccagctaattggtgaagttgggatctgtaggcagagctgtgactataaagcctgtgttcccaccagcaaatgtcatgcagtgttgaacatacacatcccaggtgagacatgccctctgcctggactgaacatacaagacccagagcaagttccgcaccttcgtgtctggatgtggggtcagtacagcttctgcacaatgagccacagtgaataaggaagtacagagaagcagggtgagggctgatgggagcaccaaggcttgggagctgggctctgtctcagatttggcctccagctagctgctgctttgcaggtgcaggattcagtttgggttgttggtggtggtgaggaggtatgtcagggagagcaataaagcagtgataaacatccctcatggtaaatcccctatggtgaacataagggatttgatgataagaacgaggtcaagatcctgtaggtgaactccactggtatggacctgggtggccggtatggagcaagaggccttgagcttcccagtaagggcctggctctgagctagacccccctggtttgaaccgagccataccagtcaccctctgtgtgactttggacaagagacttacactcattaaggctcagtttgctcatctgttagatgggcatgatgctggtgacaccaacctcatggacttgctgtgtggatcaaaatggtatcagacccatacaatcttcagcatagtacctggctcctgtagtaagcatataacaaatattaggtgctatcattgacacaaaggccacattttaccctcaacttcatttatttcctaaatggatcctgtgggatggttttgacagataaaactgtttaccaaattcttaccccgtgacttggacttgcaaggactgcaaggcggaatctaatttaacacttatttaaatttaacagaaagaaaacatttgggttggctttgtcagggtttcctttttttaaaaaagtatattttacaattttggcttttgagatatcagggtcttgagggacagacagcttacgtctaatgtctgggcctgagaagatcctgtaagagacaggtctgtggggtcaaattggcctttcagactgagcctgccatagattttctgaggatttagatgatgtgaaggggagttaacccatcccacattgtaaattattttttcaaaggaaggatgagggagccaagtaacaatttatcatgcttcttttacattttgactctgcaagaatttagcaatctgccatccatctccagctctgtttgatttgggagaattttttttttttttttttgggtagaggggagaatgattgtaaaccaaatgttgaaaagtagcctgttggttttttgttgcagtgtaaaatatggttcagtaattcattgcccaacctccctcccctgccaacaccaccaccaaagaaacaaaaactaatgtccctgctcctggacagcaagagttaattttcagcctttggttaggaaaacagaatggagggagctgtatgaactttatgcttatagcttagttctgcaagcccaggagatcattggtcagcatcagatgagctaagatgcagttctgcaactgctgaggaccaggtcctgtttaccagcagagggcacagcctgtgccaaggtacagctaatgggaagtcagagacagagtgaaatggtcaggttaattgtagagggtggcacagatcaggcctaggtgtgctgaactaagtaaaatcaaatttctctaacggaaaccccaaaaagttattaaaacacaacctccctctaatcatttaccacatggtttttaaattctgtgggtagtttaccaagaaggcctcttaggattatatataatgtccacatacttgattactgagaaaggaaaccaagactatatttaatcacaaactgtacagtgtcagaaaaagtcctgctaccctgtcttgtcactgccctgagtggcagtaatttatagcttgaaacagcagctggagcaggaaggagcctttaaagcagtcacatttgttggttaactttggttaacccagaggtcaaaagcagtttctgtctagcacattagataacttttgaaacgtttgacatattgcaggtagcattacaggaacatccacacttgtgataaaaggagttatttatgaggtagctgtggtttcaaatgtaaaggagaaaaaaaagtccttcaaattatgaaagctttggtaaaaatcccaagttggatgttgctggcatttctgagagggtgaaagggagattaaccaggaataaaatgggaaagtccatttaagtacacactggcatcccagtggcattacctgctgattgaaagaccgttatggagaaaggattaatgccttcagccttaccattagttgtcttttatgtcatgagttgctatgaagaactctactattggtgctttccagctgacctcttattgtccagaaataagtgaagaagatctattggttccaaacacattatcacggagcacttgcaatctattcgttttctgccttggtttatcaaagctaagcaaggggtgctctaaagtgaaaaggtggagaccttagattcagctgctttctgaagtctctcctcttctcccacagaacagtcattgtggtatttcataaaaaatgcatgctttggggggaataatgactgttttctaaaacacccttaccttaaatgcttgaaggttttgctggaatgctaaccttccagcatttaaggaatatatgactaagttaagaattattttttaacgcatgttatgggaaagttgaagttaattggagagaaagaaatttaacttgacaccattatatttcttcttccttctttccttccttgtctacattcaagtcacacaccacacaatgtagtgatctgggaactggccttggaataacacatcctgccgatgccatttttagctagagatctggggcaggtgatgttacccttctgagcactttccttagctccttgtaaagttgctatcaggaacaaatgaagttctatgtataagagtcctctgaacatttgcaaagtactgagcaaatgtacagtggtgaatataaattccctgagggcaggggccgtctctgatttaggcctcttcatattgccattaccaaacacagggccatttgttgactcaatgaggcaatcagccagtagacaactttatctcatcaatagcccagtttttattatgtgtccagtgtgtttcctgtctggagctttgatagtttttagagctagaagccaatgatatggttgagaaacatatcaattaggagatgtctgataattggccaaggaattgggccaagatgttattaattttcggcttccttcacttgactataagctcctccaggccaggggtcatgtctcattcatctttctatctcttagtgactgaggtttagcacaatgctttgcacttctcagtgagccggcagtgcttctggatggaatgttcagtggccctgggccgtccttttactgccatcccagacccattgccactccctgttctgaattgagatctgaacttcagcaggtttgtggacttgctcttcttccactctaggaatgccctttcaggtaccaacactgcaagatggacccttctacattctgcagtgagttcattgcataatctctattgcccactttagagcgcagacatccttctaacttctgcagatgtcattgaagttgtttttttttttaattatatggctgaatcatttatacatgtgtggtgaccacatctcatcttctagtgcaagctgctctggatagccatcttgggcatggctggctcagagaagtgagtggtcctaacgttgaatagagaaaggaaggagccacattggcagtacagttgtaaatcagagcctgaaggtgcaggtggttttgggaaatgagagttttctgaacctagaggcaagaagaaatatgtcatagaggaagttaatatttcattagtgtgtttttagtgttcatgtgacatggattgcaaaggaggaaactactgagtctgtagatgttgattagttacttgttccagtgttaatatatttcctgttgctgtagagcccgtgtagacaggcatttagacttgatcacacattcagaaggttcacagttggtctactacagtgctcttctgcctaaacaccaccagattctccctagccctccttccaaatcctggctccctcttctgtttccagtctcagctgagattttacatcctcagggaagccttctttgatatcccccagagaatatagagttggcctcccatatccgtgggttctggatccatggattcaaccaaagtcaaatggaaaatatcagaaaaaaaatgtgtctgtgctttatatgagcagaattttttcttctcattattccctagacaatagagtatagaatctatttacacagcacttacattttattaggtattataagtaatctggagatgatttaaagtatacaggaggatatgcataggttatatgcaaatactaagccattttatatcacggtcttgagcatccatagattttggtatctgaggggatcctggaactaatctcccatgatactgaaggatgactgtatctggcttggtgctccagagccccctgcacctccccttagtgactttccccacactgagcaccatttatggccattacctttttactcaaggtcccttgaggcctgagtgtgcccacttgctccccactgtattcccagtgccttgcagggggagttgcttcacaaatactgatcggattgctgttcaatgaaatctccgtgaagcccatgatattaatcacatctttcactaaggtaggtttcaaatttttgtttgtccttgtaatttttttgttttaatttttaaaatttggaatttagcctgggtgcagtggcttgtgcccataaacctagcactttgggaggccaaggcagaaggatcacttcagcctgggaggtcaacaccaccctgaacaacatagggagaccctgtctctacaacaaaacaaaataaaacaaataggtgtggtggcacatgcctgtagtcccagctacttgggaggctgaggtgagaggattgctggggcccaggaggtggaggctgaagtgagcagtgattgtgccaccgcactgcagcttgggtgacggagggagaccctgtctcaataaataaatgaataaaaataaaaattggaattttactaaggagcaaatttctgctttaaattcatttcatataataccctgggtcattgtctgaaggaagaaggatcaggttgatttccagaatgcccaaatcactccttaagtttctgaaccaattgagaagcagttgtctttcccagattcttttcattgtggctggcagtggtttccaacctttgctgcacattagaattgtgtaggcatcttttaaaaatccccatgcccaggtcagctttaagccaatgaaatcagatatttggggacgagagcatattttgagggtcctaggtgatcctaatgtgcagcaaagttaaggaatacaggagtatggactattttttcgagagggtggtatgccaggtatatagcccctaagaagtaaaaattttgcttattttcctgaaatctagagaaacaaaacttaaataaatacttttggagaacacattctacattctattttaatgaaaaaatttccaggcatatcaaaaacaatgttattcacaaaaaacaatgtaagttaaacgaaatacaaatgggcttctacagtatatttcaaagtatgtgctttggatttggattctgattttacagttcgccagctgtgttacctcgaatagggaacattatacctctctgaaacatgcaaaattagggatgaaaacacctaccatggaggggtgttacaaagattagaaagaatgtccttggaggatctagtacttaatgttggctccatttctccttctctttcctgcacgttttgagttaatgcattcagctttctttcctaaacctgtcaccacagacaagcctgctacaaggatccctgaagtttagagagattgacttccccaagtactttctcagttaccaaggataattcattcaacgggtttctacactcattttcttgtgaaggaagaaacatgagtgggaagggaggaagttaggagttggacctgagtatcctgtatacaggagtgtctgaaagtgcactgttgtgatccatccatcttttaggaagagttggatgatgattttctggctctgtagtgactcatgagccacacagggaaggcaggtttttattcattcagtcatttgagcaacagctacatgccagaccgagaagtgttaagagtgtcagaccactctaaagaaccaggggtcctcaagtaaaaaggctaattccatggtttgggcagggaaggtacaaattaagcctggagcactttgttgtaccagaaagtatacaaacatgatcagtgatgtcaagaagacagagagaaaccagcttgaaggtcttctgctggccaaatctgggacactttgagtgatggaatagataaggacagcaatggattataaggcattgaataaaatatgaagccacaagtctattcggtgacaggtaggtaagtacgtagatagatagatagacagatagatagacagacagatagatagatagatagatagatagatagatagatagatagataatgtgaaggaaaggaaagggctcttccttaacagtgtaatgccaactgacatatgtgacatgtgatatatgtggaggaagtagtgaatttgtaaagtcatcattttgcaaccctagaattgttgggcaaaaatcatcaatggatgttaaatctagagagagaggggttgataaggaacaggatatttgtatgggtttaaagtatctccccacatattgcttattggctaagactgggcaaatggtaactatacagtggaaaaaatggacaacatctcagccagatgatcaggttaatatcatgaatgagaagcagatggacatcacaaggcatccaggtgtccagatgcaggtacgtgatgcactgggaagggcacagcatcatttgtgtagtattctgaccaacactgcgtaacccgaatttaatcaggaggaaatatcaagcaaactgagtgaagaacattccacataataactgtcctgtatttgtcataggccaatgtcatgaaaagcaaaggctgaggaactgttctaagttaaaggagactaaagagacatggtcactaaatgcaatgggtaaccctggactgggttttgtgctggagggtagaaaaaacaaatgctctgaagtacattattgaaacaattgaaaaaactgggatatggcctctggattagatatatataaatattatacacatatatttaaaaatacatactgaaatattaaggggcaaagggatatggtatatgcaacttattcatctgtagttcagaaaaaataaatacacacacagaatgatacagctgtgctgaaatgttgaaattcacaagtctgggtagataaaggatatataggagttgtctggattactctggcgttgtctggattgttctctaagtttgaaataatttcaaagtaaaaggttttttaagtattggagtacagtaaataaatggagcccggctgtctgccaccacttagctgtcttactttggacaagtcactgagcctttctaaccctcagtttccttgcctttcaagtggggataacataatatcagttctttttgcattatagggttgtgtgcatgacaggtattctaactgcaaagatgtgtagacatagctgtgacattttcatctaaacccttccatacctccagggctttgtatggatcataaggctttgttcccttctatgtattagacacttgtgtttataaaccatgaggagatgatactactactaccagtaccattaataataacatcttggctagccttaaaaagtaataatcatatctgacacttacatagtactccagcttgaatagtactcatgagcctccgggtgccagacactgttctaagtactttacatgcgttatctcatttaacccttacaaaattatctccattttacagaggaggaaaccgtggcaagaaggggaggcagagtgaagattcaaattcaggcattctactctcagtttatgctctcagccagagccctccagtgaaacctttttctcctgtgcccagcaccctgcctggcacggtctggtgcagacctgataaatgtctatagaatgaatggtgggaaagagtgtttagaaagtgtaagggctctgcaactaaaaggacctgacctagaatcttcactctttcttcagtctctacattcagcttttctgagccttggttcccatgtttgataaaaacaatcctggcagagaagaggtatttaacaaatggtcatgattcttctccttctcctttgtctttttgttcttatctttccttctgaacatttccttgtgtataatgttaatactacttttaaccaggtgtttctcctctttagtgtctattatgatttttatgtaccatttttttttcatatttgtgatgacttattttacttaagtgcctccacttagattttcttaagggcaagagccacgccattttcatctttgtgtccttattgctctgtatgatgcatggccttaggagtagggccattgctagcccgtctctcactttggtgaaatttagaaaaaggcggttccttttagaaaaagctttgcagggaggagagctgtgcagcagataccagtatgtgaagaaaagacaccctgtccttggagggttacatttctcttttaggaggcacagcttggcaacgaagctatattctacctcctactcttccccaccgctgggcattttgtgtaatctgcaaaataaatgataaagttggcttggcatggtggcttatgcctgtaattccagcagattgggaagctgaggccagaagatcatatgagcccaggagttcgagagcagcctgggcaatacagtgagactctatctctacaaaaaataataaaattagccaggcatggtggagcgtgacgattgtcccagctactcaggaggctgaagtgggaggatcacttgagcccaggaggtagagactgcagcaagctgtgattacaccaccgctgcactccagcctgagcaacagagcaaaaccctgtctttaaaaaaaaaaaaaaaaaaaaaaaagattaagtgcagcagccatgcctatgagctactcaggacatattgaatgaatgaataggtacacagatgacacctccttcctggattcctttatcttttcaaacttcagactcccattgtgccacaactcactcagcctgagagatgatcccaaggctgcttgttgaactgtgggaatggttgctcctctgtagcaatccttgagtgaagcccaagggaaggctaaacctcagcccaggcaccgacacccaaactcaaattacccttcccaggttagagcaattggtctcagcttggatacagctcagggcaagcccctgtgcttcacagccttgctctttaggaagtccgtagaggaacccagctccactggtccctcaccagtgtggtctccaagtccttcctggagagccattctccccaggcccaggaagggaaaaaagctcatctggtaactgctggcattagcagagcagataccgggtgagagctctgtctctgcaggctggaggtggagccatgtggttaactgctccccgccaccaagctggctggtcacatttgcagagagaaccttgactttgtcatttgattataggtagaggcattcctaattttcacttgtgatttattattgttcttttcccattaaaataattttcttctaagatgcaaagtactaagtatttgttatagaaaagttatgataatgcaaacaaaaagaaaagagagaaaccaataatacagctcagacataatcactgtaaataccagagtttattctttcgtctctgtcttttctgcacacaggcacacacacatacacacacatacacaacatagcatcaccttcatttactcattgcattttggagacttcattcattgcttggaaatttagagattatattgatttgtgaaagcagttgaatgatctaggaatataaagtattattagcatgttgggaatggaggtgagattataccttaaattccacagatatatgcttctagtctctcatgcctgaaataaacttgctggaatgtgagtcttttatgccaagcatttgatacacaaagaacctacttcccaggagattggctaaaccaagcacgttgtgttcatctttatgatgaaatacagatttcccattaaaaggaaaatctcttcctttcagaaggttgaaaaagatgacacttcacaaaaaaaggaagaagaaaaaaaagaatcccagctggttaaatttagggtgcggaaagagatccaatcggcagataatccctggccatgggcccacagcattttcatttgattgtgcattggatacattttcattcattttaagcccttgcctttcagtattttgttccttggagacaggcaaactagtatcaatagctctcttagcctatgtcaaatggtttgatttacttaagtggtctatttcgttattccagtaaggaggaacttgtatttgttgatgcatttctgagaatgattgtgcaaagaaatgctgaaattctaatcatttttcttctatcctctcagtggtctccttgttttaaatggaaagatgttggataaaattgtgagtgtggttcatgggatgagggtgctctggatgcagagtcaggagacctggcttctcacccagctctgacactgacatcatggatacatccttggccaaatctcctaattgccttgggccttaatttccttgtctgaaaagttgggataatcatctcttctctgcttttcccacaggggtgttataaggataaaatgacctaattcagtgtctctcaacctctcttgcatattaaaattacctggggaagtgttaaaaaaataccttttgtcaggccccacccagaccagttagaatccagggtgacctgggctttggtaattttttatatcccaggagattatattgtggaagaagggttgaaaatcatcgaacatccaggcgataatatattggaaggcctgagaatgcaaattatgggaaaaggttaaaacgacccacattagtatggtcctctgtagttttcaaacggtgtcacttggagacttgttaagggtctataaggcagtggacttaaaacttttttgactgttaaactaaaaaagatcatatctcggtatacacatgcaataacatgtaaatacactcagtcccatgtaaatacagctttcacggaacaatattttctgtgtgtgattcactctaatattttttattattttccatttcattgcagtttaaactagtccatttcatttctttcattttatgtgggtgcagagccatggaattgatttaatgatctgttgtacagtcccctgacctatagtttgaaaaacactgatgaagagatggcctatttctggggagcaggctcacccattgtttaatgttgtttccttctagtaccagaatcagtctactgttgcctggatcgactttcccactctccctcccttttatacctttacttgctacatcaaacatacccagcagggttgtcctggttctacacttatttggcccttaattgggtgacttagagccttgccttctcttctgcattctaatctctgaagtgatagatcttaaacattatactttattcctcacatgagatttgttaaacaaattcaagacatattgtcaattgaattacatatagtttactaaatagattcttagcaaaaatacaagaaggtgcagttcataggttgctctagctgcaacatggtgctagtgataattttagtccctctactttggagaactggggagcccccaggccagatcatagaggaatcatctccctcttgttctgccggatcttttcttccatgcttcctggtcctcctaggcaattgtgctatcagaagtaagtttgtttcagctacagagaattctcagcttctctcctgcactcattaaagtttggctgtcatagcccagacacatcctctgtgacatttctttatccctggcttggtactgcttctgttggctggtgtgtggctctgggcaggtgcttgaggctcatagttctctctcaggacacacacactataatattcaacctaatcaaatagctattggttcctcctctctgctttactgccaaggggactagaaggtttgggtataaatttgggcaggaagagaacatcttccagatataactatctctgaaaacctcccccagcgtttttccccaatgtctgtttaaccagttttgtgtctgcttaatttatgctatattgcctctaactttgtttgacagtggcacagaatcgaatgtattcaagttaaaaaaatgtttttgtggtgtacaacatatgttttgatatataggtacagtgtggaatggctaaatcaattttcaacatatactaattgagcatatacctcaacttttgtttttgtcatgtaatttttaaggcaatctttgaagaaagatataatttccactatataaaggaagtaacagaggctcagaggggtgagatgatttatatgactattaagggtcagaggtaggatttgaattcaggtatttagattctaaatcatggcctctttcttctacatccaggctctgtatatctgtgacaggcacaggtcatccttgcttcctcaaggcatgttggatccaagacagaaaaactggtacaaaggatatcctaatgccagacgtgatcttgtcaagggttgaggtggtggataccaccacatgcctggctcctaacggagggagtaaggcttcaccagacctctgacccttctgaagccatacctttcacagtcaggtttgcctgaagctaccatgattcaccagcataccaaatccttcctgccagtggaggctacattaggctgggaaaggaatcttgtgaaaaaatagatctacttctcctgacccgtgttctccaggggattcagggagtcctctctcagactgctgtctcggttccacggtgattggcgtcctgagtaaatactctgatagactaaacacacgttgcccatgttggcccaggagcagcagtccgggagcgcgcccagtacagtcccctgtatggcagcccaacttgttaatcatcgcactggcaggctagccagaatggggatatttagcttggggcttatgcattaccatctatgctaatatggcattcttagaactataatttccgttctgacctccatggatactccttatagagaacacagacataaaacaattcttgaaatgtcaggaagaaattgcatctaatggagggtacctctgccaaggaaaacatacttcagtgttaaagcattcccatccaaacagggaaatttgaaaactgctcttgggtctgcattgaagcctgagcatttttccatgccctttaataacctgtaatgtatgtaccagccagctccactgcaggctccccatcaaccaagagggcttactgtgaaggaggtggggtggccggcgggaggtgatagctgagacctgtgtgagctggtgtcagctagaagaccttcctgggggctaaagcaagaagatttataatgggaacatataccacatgacataatgtcctacctgcatctgttacagtggagaatatgatccccagttgggtcttgaacccttggccctcctgatacctgataccaatgaagcctatcctccaccctttaggatttcatattaggagacacacaatctgtcttctgaaatcatgctggtgaacagataccacttagtaataataatattatgttgctaatagttgctgtcattatgagtgtttataatatgccaggaataaatactttacctaaattatctcatttttaccctgtcagtaacactgcattgggtactgctgttttctccactttacagagaaaactgccgcacagaatcgttagatcacttggccaaggtcacacaggtagtaagttactgacgtggaatttaaaattgatttagccagtccacactgttctagacctgtgcaagttgatcccctgagataataaaacaaacaaacaatgaaaagaaattatcttatcctctacacatttctattttatgtagatgttttacaatagatactataatagtacagaacttcatgtatgtaagttctgaataaataaatatacatatataatagaggtttgtggtccaattttttttttttttttactgatttacaaacatttggagattgctatacttaactataaagttcaatggaaagaagagagtttcttttcctgataactgatattgataatattatgggaaatctgatacttccagagggtataagccagatatttttgtctcatttgctcaccaccatattcccagtaccaaccctaatgcctagtagatgttcagtaaagaagatggccatgaagtttggaaaccagtgaacatacataatgctgactgaatgtttgtgtccactctctgctgccacggattcttatattgaaaccctaacccccaatatgatggtattaggagatggggcctttggaaggtgattaggtcatgaggacaaagcccttctgaattggattagtgtccttataaaagaaggcccagaaagctcccttattctttctgccatgagatttacagcaaaaagaaagccctgtatgaaccaggaagcgaggccttactggactctgaatctgcctctgctggtgccttgatcttagacttcccaggctccaaaactgtgagatttaagtttctgttgtgtataagccacacggtctatgatattctgttatgccagcctgaactaagacacacagtaaatttttcattgctatgacattataactcatgatatgttctgtgacattgtacaatatgcttaatgagctaccctacatgtgctccagtgtgctgtgcagaactgcagtgagccaggtgtactttcctcaagccccgctcaggcatctgaaccattccatataaagaaggcaggagtgagtgcttgcacagaaaggggttagggcaagtcggggacatggaaaagaaaaaaggaaaggctaaaatagacgaaatcaggtccgaattcaatttcatcaggtgatttttcctgattacctattgctccttaccttcttaccaatgactttcttttttcccactccattccccaccccccagagaaggaaaggtttttgcctgagtggaggtaatggggtaagcttccattaaggtggaagatttgagcctggcttgggataggcaggagaacagccacatttgaataatgtttctgtagaaacctgaacttatttcattctgtgagatagcctggttttctgcccattttgtgaattaagaaacagaggcttagagtgttccagcagctttcccaagcttacctggagggtttcctttttacgggtgctattttctttctgcttcactcctccaggagctggcccacattcacagaatgtgtctggaaagtgccataattcctccaggtgcaaagggcttagtaatttactccttcagtctcctgcttgattgtctcaaaattgaaaaggtttcatgccattttcagacatgcttaagtttctcaaagggggtagcccgggaacttgagacttcagtagtttttccttcttgaatgcccctgtccagccagtgccctaacttgtacaaatcaaggaaaatggtttgtgtggggtggaggtggggtgaatgttttcatttttcattagacgacattcgtaaacatacttgtgttttctgggttggtccagttgtcttgaccttcgttttgtaagtatcttgaagattcctttctcatccaaatctgttagaatcaccgcagtttccaaagttggctaaacatcagaatcacctgaggtgcttgttaaacacagggaatgtcctgatagcctctggagattctgattaagtggaccagttaccagaaagcagccccaatccaggccccatgagaggattcttggatcttgcgcaagacagaattcgaggcaagtccacagattaaagtgaaagcaagtttattaggaaattaaaggaataaaagaatgaccactccataggcagagcagccccagggctgctgtttggctgtttttaacggttatttcttgatcatatgatatattaggggtggattattcatgagttttctgggaattcttcctttcagaccatatagggtaacttccagatgttgccatggcatttgtaaactgctgtggtgctggtgggagtttaagtatggtaatgcattataattcacatataatgaccagtgaggacgaccagaggtcactttcatcgccatcttggttttggctgccttctttactgcatcctgttttagtagcagggtttttgtgacctgtattttgtgccaacctccaatgtcatcctgtgactctgaatgcttaacctcctgggaatacagggcaggagctttcagcctcattttacccaatgcctattcaagatggagtcactctggttccaaggcctctgacagacctagggcaagttccccaaatgtttgtttttaacaagcaccacaggtgaatgcaagggcagccagatttgggagccagtgagctatcaaacacttttaaggggaatacatgagagattccctgcaagagttaaactattttgataccacagtgaagggagcagaaaatgacattgaaatttcatcaaagctatacacctacacaggtgagattaccactcatcatgggaaaggatgatgaaaatacaaccaaaaaccttcatcgaacaatactctttactacatttactagaaaatcctagcaaattcaaaaataacatgtgaaataaagccctgaacttttcatcctttaggagcaggaagttctctttggggattggctgaagtagaaggagctctgcaagagccagtaagtggttccttgtctgtggttgttagcaaaagaatgaccatggctcacctcagaggtcacagagaagggaggtaaagaggacagttaatttctttaccaggatctaatttatcatttgggttttcagagaatgtgggaggtggctgttgggcttgttttcttttgcagcaaagctttttagagcatgactatgaggcaggcattgttccaggcaccctacactgttgcaccaaagtcccttaagagctgacgttcttgtggtaaagacagataataagcaactaaatgaaatactaatacagatcatgtcagtcaatgaaagtgatatgaggaaaatagggtaaaagaggggggctggggagaactcgtctctgaggaggggacaactttgaacggaggcctggctggcacagcaggtgccatcaggagacctgagagagaatgatctctcacacagaggcaaagggaataggaatgtgtgtgggaggatttcccagggagccatgaagatgacgttctgggctccaccctttatgcctctccaggggcctaggaggggccttagctattttgcatttgtaatttctcttaaagacacccccccctcaccaccagcccacatgctgcccactctgcctacccacacctagttatagaagctttagaccccataaaacctggatctgcccctgagaaccagaagtacaaatatgctgaagtagggaacaagcttggtgtagtctaagagccttaagaaaaaagaaaattggtgtagacgagctgtgcttaagatggagtttaatagtagattcattcattcattggttcatttattaaatatcaatttactgagtgccaggcactactatgaaaaaaataaggtccctgtcctagtggagcatccattctagtaaagagaaacagaaaataaacaaatacctatataatgtcccaggtgacaatggttaaaaatgaaataggtcaaggggggatatagggttagggtacgatggggtggtaaagtgtagctgttttgtaagggatgggaaaggaagggctctcacagttctggtctgagctgagatctggaggaggtgagagagtgggccatatgggggaagaatactccaggtggtggaatagcaaatagaaaggcccccaaacaggaacatgctgggccttttcgaggaaggtcctagaaattgagaaaagcagaactaggtgatggaggacctaggtaaggaatttggatttcattctatgagctgtgggcagcctttggacagccagtgctctagaagtctagggaaggagagagcatgggacatcagaggcctcacagctgactttaagatgggcctggaagtatccagtgggcagagttcagcatagaaagaaggccagtggcagccactgcagggccccaggcatggagctaggaaaggtaacctgtctgagggcctttgacagaccagtgctgcctggagctggagttctctgagggagagtgctggggatgaggttgcaaaggtacctttgcctgaagcatggagagccttgaagccaggccaggggaatttgatatttactaatgtgaatacctgagtgccctgagaatagtggggactccaaaatttctgtctaggagcaatttaaggatagctctcaggtggagggtaggggtgatggaaggggtagaggatctgtcttagagctagcaagcaaaagattttacctaggttgtgtatttacttgagggtggttttgggaaagggcagtggtaaagttttgaggtcttgccctaaagctacactgcatagcaaacacactgtttttacttggatggtatcctatttggggttactaaggggatggggatcaatgaaaattatggggcattaatccttggctctgtcctgggagaatgaaaattacataatgaaaggtgtgatttagaaaggtggtcaagagtgagtgtggggaggcattcactcattcatccattcatccacttagcaattgtttatgaatactccaatgtgccaagtggcagaatggaacttgtatattcctgtgttcacactctgttcctaccacttactacttgtgtcatcttgggcagcttttatttaatctcttagaacctcagtttccttgtctatagaataataataccagcagtcccctcttatctgtgtgggatatgttccaagatgcccactggatgccaaaaaccatggataacactgagccctatatttactatgtttcctacacatgtgtacctatgacaacaataataactagtaagataggacaattatattaatataccgtaataaaagtcgtgtgaatacagtcatgatccctctctctcaaaagattgttatactgtaccacatgtaactgaaacagtagaaagtgaaactgtggataaagggggactgttgtaacatgcctaccctagtggtgcttgtgattagagagaatgtgcatacagtgtccaacccagtgcttggcacctagtaggtgctcaataaatggtggcgcctactgggttgcagtagatggagagtactgtaggcagaaagttgttactgtggcagcacagatttcccacagtaagggccttcattagggcaagggtgaggtttgtagggcaggagatagttttgagaggcttggaagaacatcttgaataggacttgggtcctgaaggataagatgataatgtgaagataatatgaaggtcttcagcagagaaaatgtggaactagatgcccaaacaagaaggaaaattgggaagaaagtagactggggaaggagtcacactttaggttgaatctggggcagcagccaagtggagagagtctctagatttggagaatacagtggtttgcaggagtgagacctgggctaagcagacacattgattttaatatcactgtgatggcatactagtcaggatacaaacttggttgctataacaaagactcccagataacagtgacatatgtaagagagatgtcagagtaatccatgcagggctttggatccttgtccttttgctccacttttactaattggtagccctcatttgaatgggccaaggtggcacgtcagtgtgcctacattccactcccagggagggggagatgggaaaaagtgagggcacacccagctcatttgagggcacaacctagatactgcaaacccaacttctcacattctgcaggccagacttggtcatatggtcacacctagctgcaagggaggctggacaatgtatactttattccaagaggcctgattcttagctacagttctattattttggaagagggaagaacagatattcaggacagctagcaatctctgccataagcagtgttaaataaagacctgagattggatgagaacatggagaaaaagagtgtgacagaagtatggtctgccctcagtatccatgggtttttgcatccatggattcaaccaacctgggatcaaaattattggaaaaaacattgtgtctgtacaggcatttttttcttgtcattacttcctaaacaatacagtataacagctatttacatgaaattaacattgtattatgtattataagtaacctggagatgacttaaagtatatgggagcgtgtgcataggtgatgtccaaatagtatgccattttatgtcagggacttgatcatccttggattttggtatctgttgggggtcctggaaccaatcccccaagataccaagggacgactgtaattagttggattccattatggcaatggagaaagacctaagaagttaacgaaaaacatggaagatagacaagtaggcaaaatgggatggtgtgggttgtgggatggagcagtggttagctgtgtctgatcctgcaaaatgcaagagaattccatttggtgattagtaacatattgggtggtgacaagcaaagtctggactgcagaggttaaggcatagacaattagaggcagtggacgtggattaggctagagaggtttggcaaacacaaggaccttggaaactccaagggccagccaggttacgtgaaattaagttcaaatgtctgaaggggtttacagatattaattttactttttttcctaattaggaagaagctttaaaaaaatcctcttaactacaaggacctaatccttttggggagtttgctaatataagcataaattttttctttggcagtttttttccccatctccctcagataaccttatctcaattttgaatcagaaatcttatttatagcttttctggagagaattatttcaaagggggcagattctttgccctttggacttattttctttttaagaacagataagttatccctcgtttttctcaggagagacagttaaattattaatttaaaaataatgattttgagctgaaagggggcgtaaatcaaagttggagaaataaatccagctgcttcctgtttttgtgtttcttttcttcttattcttcttcttttgaagggaaactaaaaatgccaaagtttcatttatcccccaggaccagaagagaacttagcacagctcacaatccttaatagacctggaatgaaactgggaatggcatggccttccaggatccttccttccaccctctagctttcccccaccaccgtagcagtttccatttttaccgttatcccaagtacattgccaagcaagtgtgactcaggggctctctcggctagaaggcctctgagcctagttttgaaggccatctgagtcctaggcctttgtgcgtgacccataattatctctgcaaagatgtgtccgttgagtacttatatgggaagagaaggcagaagggcagctgcagcactccctgcacctggtgactcgctctgctggcctcagcccatggggatgaggcccatgtaggtggtggtagttctggtgctcccagccctgttagagcatgtgcagtctggagatcagatgagatgggtttgaggcctctgagcttacacacacactggatgttaggaaaaggaactgtcacggatgtttcacaggcattgagtgggcaactagtctgagtcccacagtgagtccctgtctctgaatacatttcttctgtatcgctctagctgggtggctggtcctcctcagctgatcagtcccagcagagctcatttctaaagaggccagggagtcactgatcagcagagctcagccctcaggaagctgaagaggaaagtggatggaaccagtggccccaagagcaacaatcccagattcttacccaagccctggaagctaactcgtagggtcattgaggagtgagtgagttaacgcaggtgaagggcttgacatagtacatagcacattgtaagcatttaagaaacattggctgttatttattatcagctggacccaaggcagtggcccaaattcccttaattcccactaattcagtgtgtctgaggggtccttaatactggcattgatttactttgtgaatcactcacaaacattgtgatgccttgtggaaaatgcttgtggaaccaactctgttgagaaagacatttttaaaacttaagtttttaaatattttgaaagcaatagatgcctgtagtgaaagaattcgaacctgactgaagagtataaagaaataagtcttctcccacttttcccctaattctcagtcctatttcttaaacttcaaaatggttacttggatatccttctgaaactttaatgtaatggagttgaaaacactaccttgcagatatgctaagaaaatgtagcatctattttattaattaactacttttccccaagtgctacctccttcctagttggggagggccaatagaagtgggtaatagagttgaatttaagccctggcatctggacttgacatcctctgcttcaggtctggctgggcgtcttgggctggtgtctgttaaggaagtctatggctggtgaacttgtaggcagttctcctggtagagattatatgcaatgacaaatgtagcaaacatctcctatcaccatcggctccttctgcattttcctgagaacagtggtagccttggagtaccttcctgcagcctgaatgtgctcaactgccagtgttactatgtcgttgtaatttcatgcaactgcaggatctttgggtatgggggtccctctgtcccccgaggaattcctagtgggaagtagggtacatgctccaagcagctttctcttaacaaacataactctgaccctcttcatctttctggaatttcattcccatgtgggagatgcgaatccatgatgccaacaagcaaacctcttctttttccttctcctgttgccccaacaacagaggatgaggacccccccttgcatcctattctcctcctgccctcattgtcccaccttccctgagggagtgggagagtggctgctgggaagggaatggaaagcacatgggttgcatatcttcaaaacatgatctccactgcatgaagtctgtcagtctgtctgtcagttgatctggccattcattcatctaacgtttgtctacatagtgttttgtaacttgctctttaaccaattgataaccctttttttgtttgttttttgttttttttttttttggagacagagtctcaccctgttgcccaggctggagtgcaatggtgcaatctcagctcactgcaacttccgcctccggggttcaaatgattctcctgcctcagcctcccgagtagctgggattataggctcatgccaccacacccagctaattttttgtatctttagtagagatggggtttcaccatgttggccaggctggtctcaaacttctgatctcataatctgcctgcctcggcctctcaaagtgctgggactacaggcatgagccactgcaccctgcctcaataactcttaatgacctttccattgcagcacttaccacaattcctcattctttctaacagctgtatagaattttgtcatatagctatatcaaattttatttactcattttcttactgacatgaattatttattattatgcaagtatgtctgaaaaatactttatgccctctgcctatgttttctttcctcttcctttgcaaatttccttacttgtcacctagtgtacaatcaatagtatgacagttaacttattcttttttgtgagtcccgcagatactctccatgcctcctgtatgcctgtaatcctttgcttaacaatttgacaacgagaacataggattatggtttcgggggaagaagcagcaataatggcagttaaattttcaattccccaggtgcatatgtcttccttaagtgcatactctgagtcccaagtgagaggagaacatatttagaaagaattgtaaattatttctctttgccaagaggaagggaaggagggtcaaattacgtggttgatcagttaggataaatcctgaatatggtagcttccacaatttaaagttttatcctcttacataaaagaggtctggatgtaggtggcagtccaatgctcatatagtggatctatgaaatcatatctttctgctacacctatgtccgtagtatgtagtttttacccttaggaccacaaaatagctgctggcactccatccatcacatcaacattccaggcagggaaaagtaaaagggtaaaggacaaatgaagcatgtgtcagctatctgtctgcctttttaggagctttcacagcatcccacataacacttctttttgcatctcactgaacagaacttggtcacatgcccacatctacctgtacctaggcacagtgccatcctgaataaaactagagatctgttagtaaagaataagggaagagttgtgtattagtctgttctcacactgctaataaagacatacccgagactcggtaatttataaaggaaagagatttaattgactcacagttcagcatggcttaggaggcctcaggaaacttacaatcatgactgaaggggaagcaaacatgtccttcttcacaagcagcaaggagaagaagaatgaacaaaagggggaaaagccccttataaaaccatcagatcttgtgagaactcactcactgtcatgagaagagcaggagggtaaccacccccatgattcaattacgtcccactaggtccctccaatgacacgtggggattaggggaacaagataagatttgggtggggacacagccaaaccatatcaagatgatactgggtagacagctagcagtaactgtctcttgtgatttgatccatggtttggatttctcctttcaccgagtgctgacatatgggtaatagttgctactcagagcagagatgtgcaatggcttcagttgatttcctcaccctcccccatcgtctgggtttcttcctccttccttctaaggatcttgcctcctgaatgatcagggaaccccagtgtagcatttggccataatgtagaagcatatcacatgtttaaagtttctttttctcaacctcttcttcaaaacttatctgttgtgtgcaccatctttgctgggcacagttagacagccggcttgctacccgaatcaacatgagctaaggagctaggattcactggcttcccattccagctccagttcccattgccctccttacccttccaagtccttaccctccagctgtgccaaatcccctgccttggattcttcatgtccttcaataagtccagacacttgcaccagcagccccttcaacctggagtgtcctcctcatcccttcacttcttctgcagcccattcccagcgttctctgctcattttaaatgacccattttgagcatcacctcccacgagaaggcctctctaatcccttagcatcactatccgcttttgatgtcacagagtcccccaaatgcactgctgtgacagcatgtatcacactgggtcatcagagttaacacacaagcccatttcccccaggtagaccctgcacttttccagggcaggacagtaaatttaccacacaacctcttacatctaaaagaaacgttgttactcattgttgaatgaaagagaatgaatgacaactttcagtacttagatctacagagagaataaaagaattttccctctggtggggagatcttttgggaacgggagaccttcccacagccgtgttgtgatgaaggtatctccttacttcgtcgaagcacgagcatgcttggaattgctgttatattaaagttcccaacagcagctctgtggtcaagaccgtcaagggagaaggtcttagtttgtgcagctgaagggactcatgagacatcatcagccacttgaataaaatgctgggctttctataatggtttatttttgaataggaacaggtccttggcactaatcctgtttgaatcctggagctctgtttagcagaaagatgagccggagacctcaggttacatttgttgctcaagtttgaccagacacttgtgtaagtgtgtgtcatgccggactttgcttaagtaattaacattcctgtcaaggctccttaaaagggtcctgtgttatagagcccctcaaaaggctgatttaaaactttgaactctcagcctttccattcattgccaattactgatatgcttaaatttcatttttctaaaaaaatacaaaaaggattaggtttttgaggagaaatgtttattattaggagaaccaaccttggaaagtaaggtgattttgaaagaagagagtaagtgtagaagtggtattagagaatgtgttgaggagggagtctgaaaatattttttaaattaggaaacaggagaattaacatgactatgacaacagctttcaaatgttttagggactgtcatgaggataagcaatttgatgtaccagagggctgaactagcattttcttttctttcttacctttcctttcttttttctttctctttttccctttccttcttccctccattcatcctttcctcctttttgacattccctctttttttttaaactccccttaagctcctttaatattataaggtctggaacaaaaaaacaacaaatactggcaaggatgtggaaaacggggaacccatacactgttggtggagatataaattagtacagccattatggaaaacagtatggagattcctcacaaaactaaaactagaacttccatatgatccaataatcctgttactgggtacatatccaaaggaaacaaaatcagtacattaaagagatgtctgcattcctatgtttattgctgcagtattcacagtagtcataatatggaatcaacctaagtgtccatcaatggatgaatgaataatgaaaatgtggtacatatacacaatggaatattactcagacgtaaatataatcaaatcttgtcatttgtggcaacatgggtgagcctggaggacattatattaagtagaatatgccaagcacagaaagacaaataccgcatgttctcactcatatgtggaagctaaaaaaagttgatctcttagaagcagagagtagaatcgtggttaccagaggctgggaagggtaggggagagtggagagggatatgaaattacagttaatggatatgaaattacggttagataggaggaataagttctagttttcgacagcacagtagggtgatcatagttaagaacagcttagtgtacatttcaaaataactagaagagagaaactgaatgttccaaacccaaataaatgacaaatgtttaagatgatggatattccaactaccctgatttgatcactatgcattgtgtacatatattgaaataggacatttatctcataaatatgtacaattattatgtgtcatttaaaaatttaaaaaataaaattacccagcactttgagaggcccaggcaggaggatccgttgagcccaggagttcaagaccagcctgggcaacatggcaaaaccccatgtctactaaaaatacaaaagttatctgggcatgttagggtgcatctatagtcccagctacttgggaggctgaggttcaaggattgcttgagcccaggaggcagaggttgctgtgagctgagattgcaccactggactccaccttgggtgacagagtgagactgtctcaaaaaataaatgaaataaaattatttttaaaaagattataaggtctgtaagaataggagatggatctaacttgttaacagagctcctcttgaataagtgaacgaagaaatgaatgttattacaatgtgccaagcactgagaatacggagatgaaagacataagctagaaaagaaaaatgacaaatggttcactgcaatctggagatgttaagtacctggagatgtaagtacagaactgctaagggagtgggagagggtaggtgtctgcccctaactgcagaaggaggagaagaggactgagaaaagcctccctggagttggtgatgatttaactgcatctcaaataatgatcagacatccatcagatgagggagcggggagagtgcctcaggcagggtcaaatgtgagcagagccgggagtggagagtgtcacgatggaggctgagctacctgtgggaaagtcaaaggtgggtctgatgggagatgatgctaggtgaggtcagtggggccacacagtgtatagcaagtgaaggaatgtgggttccatctggatgtgatgggatacacccgtggattttaagcaggaggccgactggtaactgcgtgaagggcacctctgaggggaaggagaaaattcaggagctgttcagtagaccaggcaagatggttctcaagaccaggtgaaggctggaacttggacatatagggtagagattggagaagaagggacagatatgagaagtattaggacttccttcttgttcgggttggttgactagatagacgatagtgcctggtgtacactagacagtgagtttctcagttatagatgacatctgttatctttacacccttaatctctatatcagtatctgatacctagtaaggtttgaactttaatactgttttcttaacaagtgctttaattaataaattatttcatgatagtaacttaatgtgccatatgtgacaaagagtgctattttttttctcctaatatctatttctcttttagaaaaataattctgggctgggcgcagtggctcatgcctttaatcccaacactttaggaggccgaggtgggtggatcacctgaggtcgggagtttgataccagcctgaccaacatggtgaaaccccatctctactaaaaaatacaaaaattagccaggcatggtggtgcacacctgtaatcccagctacttgggaggctgaggcaagagaatcgcttgaacctgggaggtggaagttgcagtgagcccatatcctgccaatgcactccagcctgggtgacagagcaagactctgtctcaaaaaaacaaaacaaaacaaaaaaaaaaacaaaacaaaaagaaaggaagaaaaaaaagaattctgatttgtagatgagtactttgctttccagtgtaagaaaagctacatttcccaggctcctttacggataggtgtggtcatatgactaagtcctcaccaagaagatccaagtagaagtgttttctggaaccccaagaaagactcctaaaaggtgaagaggaagaaccttcagcccctccccgctgctctcctctccatccttcctgctgtctagaatgcagacgcactgcctggggtaccagcatccgtctttctaaggatggcagagcagtaagatagaagaaatctggccttttctgaccgtgaagctactgtatcagtcttatatttttttgagcaaaagacacacttccatttatactacttactttaattttaactttttggatacatgtagctgagcctagtcctaactgggacacttaggaagtgttcaggtatgtaatctcttttgactttaacagctactctgtaagatatgatcatccttatttgacaagtgaggaaactgagattcagaggtattatttgatttctttaggggcatatagccacctaagtcttctgacagagttcacagctctttgctaccagatcccacttcccttagcaggcacacagcaaatgcttattaaatggaattcgcccaaactgcactgtgtttctatacctgctttgggttgggtttcatagcaagagttcagtgtcttgttggcttccctgggataaataaaatcaattctatcctctttcttcatacatatacctacatatgtatatgtgtgtttatataaaaactgacatagcagtctgaattcaacttacccattccaccaattcttcatcaaatatttatacaaatcttattgtatgtctagaactgtgccaggagtagtgaaaacaaaaataaacaaaaataaataaatcacattcccttccccactcggagcttacagttgatcttcgagggttctgacgaatttatttcccttcctaattctgaggtgatagtagattaatatgccactttatcagtttgtatgaaattagttgggcttttcaaagaaagcccataccctcagcagtggggcagttttgatggcacaccatgtgctgatattaacacgtggtggtctgatttaagttgtgattcttggtttctggatgtgtgctgtcacatttcacctactgtgtctgagcacctggttatgtgggccagaggcatgacctgaagcttcagcaactttttgagaactgaggatgagtttctaagctgggccttaagatgcttcgcagttgaaaacctaggcaagggatgtgctaagagtttgcttaggtgtgaagtctgtgttcaactttccttatggccttatctctcaacaggtacaaggaaataaaaagaaagttctagtattatgattgtttgttgaacacttttaaatatggcatgcactttacatactatcatttcattctaagaactccatgaagtatcatcatctgtattttacagatgaaaaaactgagattcagagaagttaagaaatttgcccaacgttaacacagctggtaaatggcagagctcaaatccagctctatatgactccaaagctccacactaaactggcccgccttctttggttactttagatgtgtgtatttacaatccatcctcattgaggctggaccagaagagtgagaccaccttgcttctcggcacttgctcatggcaaaagttgccagtactaactggttactacgatgaagagtgttgtcgttggaaactttagtaatagtgtttctgcatttaacatctccccagacattacatttgcttaggaaaaaaaccaacttgttaaacctgtcttagcaaactgaccacaatttgtaatattttctttaaaggaagaaaaattaaaccctgagtttccaaaatcccataaagacagtggaagggctctttccaccagggacttgcgtagttgcatgttgttgcctccgagaattgaaagtgtttaaagcattattttattctattgtgctgttatcacctcaatcagtataattctacacttttatttcctggtctagggactcagttttgatgagatttattgctttaaagaggatagcccttttttggagactatttagtttcagattagttgacaaagtaacgaacaagcttggggtgatcttgaactaaataaacgtcatgggaggcagtggtgctatcaatgaataccgcaaggactgtggagtcaggtaaacctggctcctctattcactaactgtgtgatcttatacaagtcactaaacctctctaagcctcagtttattcccctttaaagtggggataggactgttactgatagtaaccccttgtaggattgttatgaggattaaatccgatgttagagcttgggtgtagtgcctgacacagggcaaatgctgaacacctgccactcatggttcgttatcattcttatctttatgttctatcatgtaatttcgccaatgtggttaaaaccagttagttccctcggaagttgtcaaacaaggagacaggcataatatgctcagcaattggagatgccgctctcttggttcagttactcagagctgtcaaagcgacagtcggaatccccttcctggagtgttggctgtgcctcctgggtctcccgcgtggattcctcacagatggcagggcacatcccagctcggcatgtcgacatagtcaccaccatggcttttaatgagaaccattcattgtagatggacgcttttgagttttgtacagagataaacagatggcaaggtttgtataatttcctgctgggtaatctggtactagaagtatgatctatctggaaactacaaagtgttacctagtctaaggtgagtttttacaacagaagttaaggaaaggctgaatgggtctcttatggaattatgcccaaatgttttaccctcaactctcattcaggctgttaagtacagttctgtcccatctcaactaagcagtcttaacttagagcttcctgtttctttgttttgtctttttgtaattactttttctgtttgtttggctgcctctgaaaatactgtttcagggcagtcaagttttagctttcctttcaactgagggaactggcattgcatatggtgaggctcatcttctttactggaaaatgaccaagcattgaaccaatcgcttgaaaagctcttacttcagatcaatttcctgtaccaaatgatatcaccttactaggaggccttcactcttgtttttcaatgacccttatttcctctgcttatatgcttgcattctactttggttaggtgctgcctcatcagactggactcttaaactcaatcaaatttagttatttgagcccaccaggtttgggattttctaaaattagttcttaaggggacttgatatgatttaggagaagctcaaatgaaaggaattactgtaagtaaaagatttagaatggtgcttggcacataataagcactcaataaatgctagcaattgtggtggttgttattattccatcattttatgcaacttgttggatagattctgtatccaattgtgggaataagtataagaatttttcattccttctggagaaatgacatcatgagaacccagactgagaaaaaacattcctgcatacaaggtgaagggtgacatattaaagatactatcctataacataaaaaaaatacacagtttcctttactggctcctcttacttttttaaatttggaaatggattctcgctatgatgctcaggctggcctttgaactcctaggctccatcgatcctcctgcctcagtctcctgagtagctgggactacaggtgcatgccaccacccctggcctccactcatcttaggagttctcctcctctatccctaccaccatcatcaaccctgttgggttcacctctatttccagcatcgaatacagtacctggcatttagaagatgttccgttggcactgaactgctctaaagtgacctgccccagtcctaattctgccatgtactatttgtgtgactttatcactaaagtcagtgataaaatcagagtttgccctcagggccccagcttcctcaatcatagaattggagggggagcttggactctaggatctcctgagttcctcctggctctgaaacttgatgtcaccttggggcatttgggtttctgttgactggtggtgtgctggaacactttatgcataaacattcatgtgaggatgaagtatagttttacacatgttttttatcctggaaagtgaaattagtttgggaagttcttcttacaatagatacacaaattccttcttacattttgtttcctttaaggcctatggaaactggtggggttgtctgtgtgcatatgcctgtgcatacttctgcatctgtttataatttacagatagatggtaagaattttttctgtcagatccaagaatgttaaatagttgtatccgaagctagtcatccacttttaggaatatgttctagcgaaatagcctggaatgtagataacgatttatggataaagtgactataacaattttatttacagtactgacaagcagaatacaaaataaaatgctcagcaataggagaatgattatataaacttgataagaatatttatactaaagagccatatacaaagatattttgttccacctcagctatttagaacagtagatataaaaagtagaggaaataaccccaaatgataatggttattactggatagtggatcatgaaatatttttattctcttattaacacttctctttctgttttttttttacaatgagtattatttttcgtatgagaaaaattatatttaaaagttcaaacctcatctgaaatatagacaatcctggtaataaacaccaaaaatgtcaatgcaggtttcttcactgcgtgggaaataccttgacagaaaacagtgagatggatcaaactattctgcccccgagtttattgtatacacccactagtttcatgcttggcatcaggaccttctttgaaaggtcctaactatagcatctgttggactgtctggctgggctccatgtccatggcactgcggttaaaggcggaaagagaaggtcaccctgtaaacttttctgccaatgaccacagcagcacagccagcatatgtctaaatgtgcaggaatttgttcaacacagagttcaatgtttatagaagggagtgcagacccaggaaataataaaatgaatgaatttaatttcccactaagtgttttgtgatggagagcattaaataggagcttccttggaatgctattaatgcagcaaaccctcagtatcactttactccaaatcctggattctctaagcctgcaggggggtgtgggagaagaaatcctatctgaaatcatccagactactgtagttatgccagtttctgattgtgtgaccttggacagtttactcattcactcacaaaatatttactgagttgctgctttttgtgccaggtgctgggaataaaagaatgaagaagatggaagacttgctgtcataaagattaatgcccattggggttggaaggagatgcagacaagatatttcacttcgttgcaactcttgttttctttgtcttttccttgaattctttggttcttcccagtttggtctcaggccttctctcacattgtgcaatctcacttgagagtttcaggctctcctgtccttgcagatactgcttactgaggaaggattggccatctataagtctaggctggggtgccctcctgagctatggactcatagcactggtagtcagctggatagttccccttggcagtctaacaactgtgtataagttggcttgttcaaaactgagtttggtgtcatctccacttctcttccctgcaaactggcttctcctgtgtttcctgtccccatgaatggccccattgtccatccagtgtccgagccagaaatctccgctcttccatgtgttttccacccctccatgtgtgatgaaccgtccagttctgtggattccccctcccgtgttgatctcattcatttcagtccccttctttttaatctaaccactacctctcttgaggtttccctgccacctgtctttctccctttcacattccagacagatgaatctgtctccttgtaactctgatcacatgactcctctgcacagtgcctcctgcctggctgcccactgccctttctctttaatatggcactcctgagttctccagtctaattacctgcccactttttcctcaaatcttaagactttagtcataaatcattactttcttttatccatatcatactcattttaccttatgacctttatatcttcatgcatgctgttacctctgtttagaatgttctctcccttgcgtcttcctcccccactccttccctcatttatctgaaccaccccatttcattctttagatattgaatcagacactacttcctccaggaaatctttatcgaattcccaagtctaggttggacacctctacttcctgttgccatagaccctgtacctcctccatcatcaccattaagacactgcttggtctccttgctatcaccagaagaccatgggcttggtgagggcagaggccaccactttttgtgtttctagaatctagcccagtaatatgtaattgtaggtacttaataaatattgattaaaagataaatttttgtttctccggatgacattagtctggacataaaagtaaggttacacagtaataataataacacaccaattgttttgttctcttggtccttccttggaccaaactctggttataactcttgcttcctttaggaagctcttcaacctctctggcaaactcacattgtgtagttcatgccactgaaccctaagatcaaccgcacttaaaaaaatacattggtataaaaggaatcatacatgggctgctgtctaagattctgattagaaaggagaaaaatgcctaagtaagaataatagttaacattcactgacagcgtcttctgccaggcgccttctaactactttacatgaattattttgatcctcccaacaacgctatgagcaaagtataattatttccattgtacagatgagaaagctgagatccagagaagttaagcaaccagcttcagggcacagagcagaagtggtggaaccaatgcaggcagtctgattccatggtcaccacccttgctgcctccctctatgaactctaaaaaatctttagctctaaccttctatgtttctctggttgtcaaaagcaaaagcgagcctggctaataaggcatttgcaattgcagggcttcctctcactcagacagtatccctggttgctggaggacccagccagtacagatgggggtcagtcccctctaagccctctgtgatcacatccttatttcctagatagatgttcatgctgttcatgagagacagtatagcacagtggctaaaaagtggactctgaattctgactacctgagagcaaaccacaaccctttcactcattaggtatatgaccttgggcaaattatttaaaccccttaggcctcactttcctcatttatacaaggaggatattaataatattacttaacccataagctattataaggattaaaggagttaatatatgtgtaacacacttagaacaaggcttggcccacaataagcactaagtgtgcttagtccactttttgattagtatttttgtaattaaaataatcttgttaatatttactcaagctggtcttagagtgctttgattaagtaccaggttagctcaactactgattgagctgtagatatctggtagatacctaccagttctttcatctcattatgggctttaatatatatatgtattactcagaaagataaaaataaatcatctgcaaaaccccacttgaaaggttttcataaatcttgtaaaagttgggccaagtttaaagattgctgcccagattggtttaaagcccttcattgtctacaatctaatggggatgcttataaagggaggatctggaatggtctgtctggcagtgtgtgtggtcaccggaatcacggccttttatctacctgatgggtatgagtaggaggagttggctcaggctccaggaaagtcagcagatgataaagcccttgtcctcggtcttgctcatgccagcagttggagagcagtatattgtgtgttatcaggttctcagaccctagcctggcattcatgggctattctccagccttgatcaaacccacctttccactgtataccgttccacacttaccctttcttttgcttagaattttctcaccctatctgagtaagacctaatcctaaagaggcccagattaaaagccatttcattcctgaagttttttcttagcactctactggctgtgttcttttcctttgcactatgcctacgtctcatgcctgttttccctttctatatttgttgtgcttataggaatttgccatctaacctgggctctcaaatacttaaagttttcacatccatccttttatttagaccttaaaacagccccatgaggaatgtagcattttcatcctcacttttccgatgaggaacccagggctcagagaggttacgtgatttgcctaaaacacaaagttttaggcaaagttaagtcagactccaactttggtgcattttttctctgccccaggctccctccttgaagtcttatgtcatgtcttgctcaagtttgtatctccctgcagtgcctagcacagctttaggctcagtaaggtttttttatttatttattcaacttacatttattgtatctatgaggtgttagttaggtcttgggtactagcattaagcaaacatagatatttgtggaagaaaagaaggaaagaagggatgtggacatttttgttttacttagtaaggtgggtggcatacgattcataagctcaaatcccaaccagggcaggtaaaaatgagttaagaaggttgggcatgacccactgaaaagtaatggggactcttgctaactggacatcaatactgtctaatggaagcgaccacaacttaattccagttaatcattgccatgttggaatatgggcctagtgttttgagattttccattttttcaagaaaagctggaagtccagacttactatacagtttctttatagtcaatgttgccaactaatttgtttttattttttaattgaacagctaaacaatacatggctcatggttaccactaacctccttgaaatgctgaggattgagccaaccatgcagccagtggtgcccacgcttctgaggcagggagccagtgctcaggaagggcaggctgctgcttctctccttctccttgttagcccccatgtgggtctcacccacctgcaggcctgtcttggctttgcagcaatactccacctctttgcccctgccctcctagcttgtctcccgttctttccctgctgtcaggggtggtgactgccctgtctccttcgcagagatcctcgacactggatctcaccctctaatttagctccttgtctttattgcgatgaatgaggttgagcagatgacaagcagagatctctgggcagaagatcaaacgctccccctgggctgcccagagcatatttatgactgctgctttgggaagttccacccacgataatgcgatgcctgcagagagtgaacttatctaccctctccatacctctacccagtcccagtgggaagatagagatttgtaaagaagacctcagaaaacagaatccgtgacaatctgtttggaattttctcttcagctttgtgatttggtgactataaattaatagaacactcatgtaaaatatgactggagatagttgtgctaagtgactcctgcttcagggactagtcatagagtccccaatattgggacacagggtggctcaaaatacaattttaggggcatcagcaacagacttgctggatgtttgttaaaaaaaacccaatccctgaacttcatcccagatctaggggtggggtctgggaatatgcatcttaacaagaatcacagcagattctgatatatgtgaagattagaaacctgtaactaatgataataatgaacacagaaccctaagtattctaagtgctatgtatttatttcttacaacatgcctatgagacactggtttttctaagtgtggagtagatatcactgtttgcaattattttgggtgctacacggagacattttttaaaaaagatttcaaagttatgtgtttaacttacatataaaactcatatgtgtaataaacccactaaacactcataagttcatcaacattattgcttaagtaaaggctaaatgtatttaaataaaaatagtgaatcaatttaaagggaaatattaaataaatactaattctggtaacaaacattgtgagggtagaatggggaaaattcaagtttgcaaagcattgagatgagtggaaaagctctgtactgagtcaaagaatttgggtttaaaccttgaattaaattcttactagctgtgtggccttgagcaaatctctatctctctgagttttagcttcattcttagcaaaatggaaatattaaaacaaattcagctaggctgtggtgaaaagcatatgagaaaaaaaataaaagaacacttaataggtggtcaagaaatattattgaatataaatattactctaatctttctgaagtattaattcaatatgaggtgtttttcattgttgttgttttgagacagagtcccctgtcacgcaggctggagtgcagtggcgcaatctcagctcaatgcaaccttcgcttcccaggttcaagcaattcttctgcctcagcctccaatatgagtttttaatgtggacattacttgaatctcctttaaaacttgttagaaatgtaaacccttttttttcttttttattgtttttagagataggatcttgcgctgttgcccaggctggagtgcagtggtatgatcgtagcccactgtaaccgcacactcctgggctcaagcaatcctcctgcctcagcctcctgagtagctagaactatataggtgcacaccatcaccaccggctaccaactcttatttctcatatctttctctgagttatgttttcactacatttactgaggtatgagggggacagtgcagaacttgggttccacctctgcctttagctatcgatgtgatctctgacaagacattttgcctcattgtgcctcagttttataatctgtaaagtgggattgcactcaaagacttacaggttttctcccaacgtctttgtattggagctttttttaaattatctataataaactgagaacagtcagagcatagattaaatatcacttttgcccagtaggcaattggccagaactgctctacagtggcccaacttacaggtttcatcttctcacgttctttggaggtgctaacgagcagtaaaaccaaatggctggcagaaggaagaggaaaaaagaggatactggagcaaggaatttggattctcttcaagctcaaaatatctcccaaacgaataaaagttgattatgtttttatagtactatagttcgatggtacgatatatcttgttaatagaatcatgctggcactggactgaagagattcatgattaagttatgtctatttctttctgccttagaaatagcaatgaaacctggattttttttatatgggagctcttcagtctttaaaaaactgaattaataactgagatggcataattagctgcctggatgagctctcagaaatcaacttttctttgggtcagctgtcttccagttaagcagttatgcggaaacctttctttttcatgcccggaagtataaaacagaaaaatcatgggatgctgaaattgctgaacacacacgaagcggtgccacagtgtccccaccctgtgccaaagcaaatttctgagcgttatgtaatttctccctggctttgagctcccgtgatcctgtctgaggtttatgctatacaatctgctaaagctgagctctttcaggcacttccttggcgggtgacatcttgtcaatattagagacctgtgattgggagaggggagagaggctcccatcatttcagtctacatccagcaccctgcattttccaaaattcatgctggggattgctaaaacagacggcatttgttggctgaagagtaaatcacgactttcgtgggtacattcattcatttggaaagtatttttgatcattcactgggctaatagtgctgtggggaatttgaaaaaatgtattttatatggtttcaaaaacaaagtctatggtagagcttttgccctcaaggaatttacagtcctttagagagccaagacatgcatttttaagttaactaacagcatgcacaaaaactagatacccctgtgatacactagtggtaaagctagcaaaaggtaatgtcatggagtgtgagttctggttgggtgatcttgtctaattctcttacattcccagtgaagaaacttaaccacagaaaagtaggaaaggccgacctgaggaagcacagccaggaaaggattgcatttaggcttgaatgcaaatctcataatgctttttgcactctgctttctgctaccccacagccatctctctatatgtttaagcatgaaagtggtgatttcagaaaactgttgatgctcagagggagaaaattggccaactttaggaatcaaaattccaatattgctccaggtaatgccagagaaacataatttgacctaatgtggtccacatctttctagtccagtgtcaacatcattcattaactagatatacactgttatgtactataaaaccataaccaactttccaccattttggagaaatttctagcataaggagaatctagatccctggtttgtcggtgtcatcttttttcttcctccttttgtcagtcacttggtcatattgctcattagcaccttcaaatggatataggaaaatgaaactacaggttgagtatcccttatccaaaaatcttgggccagaagtgttttggagttcagaattttttggattttggaatatttgcatatatatggtgagatatctaggacacaggacatgggtctaaacacaaaattcattatgtttcatatacacctatattagtccattctcacactgctaataaagacataccccagactgggtaatttataaagaaaagagatttaattgactcacagttccgcatatctggggaagcctcaggaaacttagaatcatggcagaagggaaagcaaacatgttcttcttcacataatggcagcaaggagaagaatgagagtgaagtggggggaaagccccttataaaaccatcagatctcatgggaactcactcactatcacgagaacagcatggaggtaattgccccccatgattcatttacctcccattgggtccctcccatgacacatggggaattatgggaactacagttcaagatgagatttgggtgaggacacaggcaaaccatatcaacaccttacacacatagcttgaatatttatacaatattttttagtaattttgtgcctgaaacaaaattttgactgcattttgactgtgacctatcacatgaagtcgggtgtggaatttttcacctgtggtttcatgttggcgctccaaaagttttgggttttggagcattttggattttggatttttgggttagggatgctcaacctgtagtgagttggctgtcactcagcagctctggaaaattacctgtctgcactgaatttcctcatcagtaaaatggaaatgattatagtactgaccttgtaggattattctaaaaatcagagaagttcatgcagcttagaacagtgccaggcacatggcaaatgctatggcatacttaagcatcttcctctgtggtgcctcgtcatcaccatgtgattgtgccttgcttgttcctgtttcacttttcagagggagaaaagtggccaactttaagaatcaaaattctgatgttacttcaggaaatgcatagagccagagagacacaatttgacttagtatgatccacatcatcccctcaggctgaatagtggtggcatgcacatctataccaaaatgttttaccttttttgtagaaggaaaatatttgtatcttctattccatatcttagatctttataagagcacttaagttcaacctcctaagaaactgccaattttgttgatcacgatagtctgcacagattttcgtactatttagtgttgggagtgccttagggaccatcaacaacaggcccctccttttatccatgagactactgaggccttggaggttatttgtccatccatggcgggtgcacactagaggttatctggttagtagcccaactaagattagaacccaggaattttgatttaatctcaaatgacctcttttatttctgcatccgggaaggagaagaggaaagtaaacgggaaattcatgttatctatggaaaagttatcagtttgatgtttattaaatgatttgtttcaggagattgtttacaacttttatcttcctagacaataattttctgtaagagtaaagtcatggtcattaaggtagtcatattaatgtattcagtaagctgtgtggtgtggataattttggttttgacaataattatacttttattgaacacttcctgtgtgacagatcatttatgttcttttctgctgaaaattcagtatgggctgggatcacatttattttgtagattattctgtctgcaattcccaaatatagtgggcagcacatggtaaacactttgtaaataattgtaacatgttgtagttttgttatagcgttatgctttgtaaaattaaaagtagctatatccttctatgatccagaaatttcacttctggttatataaatcaaagaaatcctcatatggttctataagagaacatgtataagcatgttcatcacagcattgttggtgatagctgggaattggagacaatctgaacacacatctgtattagtcaaggttctccagagaaacagaaccaatatatataaagagatttattaccaggaattggctcatgcacttatggagcctggaaaatctgaagtctgtggggtgcgctggcaggttggagaccaggaaagggccgatgctgtagtttcaagtccaaaggctgtcaggccgaagacctgggaaagagtgaatgttgtagttcaagtctgaaggccatctgctggagtaattccctcttgcgctggggaggtcagccttttgttctattcaggcctttaactgattagatgaggaccacccacattatggagggcaatctttattcagaacctacccatttacattttaatctcatcctaaagcactctcatagaaatgtcaagaataatgtttgaccacatatctgggcccagccaagttgatgcataaaactaaccattgcaccatccctgtgaaattatataggtaaaatttaatggctgctgactcgggggtactgtatcaaataaacttccaaagaagaaagagatggtatgctcagaagagttcaactgaaaagaatttaatgaaggtgctgcttacgatggtaaacaaagttaaggaatcagcagagacaggcacccagggactaggaactaggcttgaagggtaaggggagagaatgatgcaattggaatccagtgagactggagccatagaagagggccatcctgccagaagctgtggccataaaggaatagacctactgccaaatgctcaataaggcagagagggagggataggtgaggggccagggtggtagcctgaaacccgacctctttcttctggccttcagtcttctttgggtgtccctcattggtcaaacacaaccagaagccagtgggcatggggctctgggtgatgtgtctgtagagatcagccttaggggcacagagctgggcaaggaatgactcagtggcctggaaagggcacatgatgaaaggccatcataaatagtatacagcagttagaaatgatggagtagatatgctcaaaaccacatggatgaatctgaaaacgtagtgcttggtgaaaaaggtaacaaatagaaagatctaaaacacaattctagttatgaaaataaaatacatatgcacaaaacaacaatgcacatctgccagactatttgggaacaaaagcatacacatcaaacactgtggaatagctgcatgtggtataggaaagtaatgtggattaaagggaataaatgagaaggagagagaggtctttcatggaccaatgatgataatgtgctatgaacagaggagagtgattaagtcaactccgtgcactaaggatccaactttatgagaaaaaaatatatttataaaaaatatataacatatatatatatatatttggtattgatttttctgttatatggatgaggtaccttatccatctaactcatgctgccagattggaggaatttgaggcctgaggggttcaaggaactagcccagggttatgaaggtagtgggtgatctcttgaggaaatgagacgccatggatattcttgatgtagattcttctcttcagtgacattgtcatgaccccacctcattgagatatttgatccacacaatacagtgatttaaggcctgtgtgaatgtaaattactgctgttcatttttgtgctcctgcctgggaccagggaagaaattctccaaacatcctgctttccgagtttgaggacttactttagaaaagtactaccattggctttatacctatcattagctaaaccttctgtaaatggcatcattttgggagcaaggtaattgtcaggtcaggcctggatagacatatacctcctctgttatctgcaaggttgctttcaatctccttcttttccatctgtctacaggcatctcaatggtttatgttaaccttagaaaatagggcttgggtttagccacaggggatggaagatggccttagccacatggctgtggaagggaaggaggtagggatggccctagtcacactgggcctgtgtaaaagggccaaggagcacttgcccctccaagggcacttgtctctggggctgtacttgccacaaacctaatcctctccattacatagctctgcaggctaagttttcaggagacagcacagacggaaaagctccataaagctgttctgatcctcttagcactttgtgcaaggagcacagataagacttttgattctgggaattactggaagaaaaaatatacctttgtctgaatcactcatgctgccagattggagaaacctgaatcagtttgatgttgttcataacaacaacggtagtaatagtaataatgaaatctgtccccaccatttgtttacctactctgtaggaggtacagtgcttgaaggttggcatccgtgatctcattccattttcacacaaccttgcattttgctggcagagagaccaaagtcaaacaggttaagcaacttagccaagaatagagccagaaaatgacccagtctaacagcctcctcagctcctgccctgtcctcacagtggttccatcccaaatgcagtagccaagtctgtcctgagacagggtggcattggggtggaagcccaggaaggctgaagcttcccaggtggggctaagtggaatgtccccaaggcccagattggtgcccattttaagggcagggtttccttgatgaggttgttctctcttcttgcctggagagaaagcctatgttatcttatgaaatatcccctcaggtaagaagggagtgcattctattatatatcaggacatggatcctgccagactgcagtgagtcaaggctgcttcatgatgtcttgagagctggtgtcctgggatcctttggctgggctggaaggttcagctggtccacatgggtaggaggatgtgttgggaaggcaggagaagaaggatggcctggcctagcggtttaagtttgctcctagagagcagaagtcctggcatagaaaaggggattcctgggctgtcacagtgagtccatattagtttctcttactctgatactcttcaaagtccatccaactggagtcacatactcccttcttctttttgcaagcagtgctcaaaagtgaatcaagcccactcagcccaatttgttgttaatgcttgttgctctcgcttgcctccctttttgttttctctttttaaggctgttttgtcctagtaacaaataatataaaaaataaaaataaaataaataataaaatactactactaataattggcaacaagcaccattctagttgctttatgtagatgatctcatttgatcctctgcagaaccttacaaattattatccccaattggcagatgaagaaactgaagcttggaaaggttaagaaacgagttcaaggtcgcccagctagaacattgaggagcagagaacagaatgctattttgtgttccttcaaagcctggcttactctctacttgaccacattgcctataaaatggggatggtaataacagttgccctgcttgctttgcaagcctgcggtgaggatcaaataagacagtaattgggaaagcactttgaaaattgcaaagcgctatgtaaatatatggtattattctaatgtatcacgggcctacaaaaacactgctcaaacatttcatttaagagaagacacaccaaaccattattcaataagataacaccatatgtgatcctttcatcattccaagaatgtttatcaagtccacaaaaccaaagccattagtaaggttttgttttctgggtaggctcagcaaacttggagcaagctcaagtggtctttaaatagtcaagttaaattgaagagaccgcattaagtgtcaaataattaaatgcccttacagactctgggagtttaagatatatgctttcaatacattagaatattcctaagagtagctttcaaggagttgaatgggaatccctttggtactaaagggagcggtaataataataacagaaaataatagcagtaattttaaccagtggagtagtgtgaagaacactggctatccaaccagactcctggtctactagatatataacctggaaaataatttaatctgtctgtgctttagttttcttgttggtaaaatgggagtagtaatagcaccgaccttgtaaaggctgttgtgatgattaaatgagcaattggaactgcacctgccatatatagtatgtactctgtaaatgttacctcatgctattattatgctttcttaagcacacaaaatatttgcaaacaacataagaataaaatggtaaagaaactgacttcagctgtaataactaaggtcctccaatgtgccaggtatgatgctccatactttatatacattatctctttaatcatcataacaactctcagggagagattttctcactctccccctccgcattttacagatatggaaacggaagtccggaagactcagtgtgatcatctgaattgctctttaagacttttttattctttactactttcccaagttgccaaagcctggcagctagcagcaagtcctctgccctggatctgattggtcttgagaatggggaggactgtctagtgtttcagctgtgcctatgctgctgagagatgggcaataggggaagcgggacccctctagaagtgatggctgagaaacttcaggctggactttccacaccttttcagggttctggagtgagtcagtgttactcagcccacttagggctattcttgaagctgctttgaaccagattttaaggttttagaaacattcggtaaggcaggagtgtggctggtaccctgcaatccctccagaatggtctggtttctaactgggttgatttaggatgacatcacatcagttcacagcattaaaactgcctttagcgcctcattgtccaaaaggacaatgtcctcattctttaatattgcggttgagtggagtaagttttgacttcagaacctaacaggcacagatctgaatcttggctctgtcatcaatgagctgaatgattttgagataaggtaaatttctcagagccacagtttccttatctactaaataatgcttccttgccagatcaaataagatgcaaagggacgcaaagtaccccacacctggtgtggcttacagtgagtacttactaaatgttacttcccttcctttctcttagcaaggcacacataaccctttctaaacacacctcgacctgtttattaacatactgtactttttttctatgtgcctgatagttcatgaagaccaagttgaaacatgcctttcctagttttgccacagaaatgagataatctatgtggaattacctagcttattgcctgggacaaaatgggctctaaataaggaagaatgagaaggtggctgaatggtaggagctaggaatgttggtaatattttctcctgaagcgtacccagacttctctgggaaacttgaatttaagaaagcttataagggagactgtgcagtggaaggggtctggtcaaggagaaacagagcactggtgcctgtatactgccctcccccaataaaatatttgtctcctctaccccacaagccagaccacagccattcacatttaaagcttgtggtttgtccatccttgggagggtgccacgtggaataggattatattaagtgcatagtgatggctttgtggctcaggcagggaaatgtccctggctaattgcacattagatactagtcctgtaaatgttattaggctgtgcaagctagctgctactattaactttatgttgaccttctttgtaccaaacacaagctctcaaaagagttctttgcagagtgccatttaagggctcgtgcagcctttagaagttgatttggggatgcctgggaatgcagtctcctggaattgcatttaggatcctgactcaatatgtattttcattctggtgtttcttttggtcctattccatgcgttggatagctgaacatggacagatatacaatatgaagtctctttggtttccatagtaacacattatttatctggcattgtcagctcattaactgttccacccaagtgaattttccaactaatcgaagcatttctcattaaatgccaaacagtttgttgtttaatggaaatctttcctaatggattacccacgcacctctgtcttccgaaggagggctgtcttttcacaatactgcttggacttcattgtgagtttttggatggtgctgtcatatatattactacatacccagggtgtgttgaactctggactaattgctctaagctgttaaattttttgagtccctgggtctccgcactttctcctgagtagttcccagtttatctgcctccatctcctttcctgatctcaatttgttgtgtctagtcaactccagactaggaaatctgataacgaagcttgtgaaaagtacgtataaacagcttctgagtgaaaacctcttgagcttttctaaggagtaagagcttcaatgcaacaaactgggctgattctccacaacagaaagcattctgcctcagacattgttttgtcagatatttgtttacctatcctgccaaatttgagtttcaggaacctaatccaaatgttaattcgaatttccaaatcaccaccgattgcccatccctaatcaaaaaattctaaatgctccaaaacctaaaacatttgagcaccaacatgatgccacaggtggaaaattccacacctgacctcatgtgatgggttggagtcaaaactttgtttcatacacaaaattattaaaaatataggggccaggcatggtggttcacacatgtatgtaatcccagcactttgggaggctgaggcaggagaatcacttgagtccaggagtttgagaccactctgggcaacacagaaagaccctgtctctttaaaaaataataattattattattttatatatatataaagtaagattacctttatactatgtgtataatgtgtgtataaaaaataaattttgtgtttagatttaggtcccatccctaagatatctcattgtttgtatgcaaatattctaaaatctgaaaaaatccaaaatctaaaacacttctaattgcaagatttttggataagggatactcaacctggactatccaagtgctggctttaagtgggatgttacaaggccttcagaaaggtctgttcaatcatttcttgttcactgccaggcactgagcaaagcactggccacctagatagacatagtccttgcttttgggatactgaaagtctagatggaaaaaaacttagaaatatgcagataaacttgaaaaatggtatagaggggtgcatgactaggttctgcatagcacagagaagggaatgatgtctgcttagaagaatcaaagaccataagcaagaggagataatttgccctccctctacctcccttttaaaaattcatttatgtctttctgtatttctcttgttcctatagtcaataaacacttattcaatacaaactatattcctttcactgagattgcagtagcatataaagcagatataattcctgttctcattttgacataaaggatgaatagaaagaaagggaagaggaatgaaaatgggcatcccaagaaagagaatcacggatcgaaagggcaggtgtgtttggaatggtgagctgtcatttagcatggctggaattatgggaaaggaggttgtaaagcatgctctgctgaggacttcaaactttattatatgtgcaggagatgcccagcaaaggttctaacccaggagttcttagaaaagtgtcaccaggctgggcgtggtggctcacgcctgtaatcccaacactttgggaggtggaggtgagaggatcccttgagcccaggaattcaagatcagtctagtcaacatggtggagactctctctacacagaaaatttttttttaattagccagacttggtggtgtgtacctgtggtcccaattactctgaaggctaaggcaggaggatcacttgagcccaggaggtcatggcggcaacaagccatatttgactcactccagcctgggtgacagagtgagaccctgtctcaaaaaaaaaaaagaaaaaaggaaagaaaagaagtgtgaccatatgatgggggattgtggcatgggaggtgggcagcagcagagaaccaaacccacaacatctaataaatgacatgtaattttcaacttcaactttaggtcttaaattttgggttttttgcctcaattacccagaatccatcaatagcttttctgttgtttctgcctctgctcttttcccttgaatgctgtcacacagatccaagcaattagagcctacagaaacaagtagaggctgcctgaccccaggaatgggctaatagatgactcagccatagttttgctgcagaattatgtcagtggaatttattaatgcctgaattatattccatgttgtactggttcttaacccacatcatgaggattaaatgagataatgcatgtgaaatcttcatgcctgacccataagcactaaataaacagcaattgtctttaacccgtgcttattccactctgtcacactgcctgccaacttaacgcacttggtcttttttcaaggtatatgggctgtcagcttatcttcactgtactgttagctcctcaattgtgggatctgggaatgttaatctttgtatcatagtgacttttaagttagattatttaaacatgtcattctaatcataatgcagagacacatgcatgctttcagagagcagcagaaattcagttttaatttatcattgcattgaagctggaagaaaacctgagggtattgttctcagaagttttaacgagaacaacattctctttgcattatcaatgttcctcagtcgccacttggctggagcaactacctctggcttcagttagctatttacattcctctatttttatataaattgtgctatattagcatatatttcacactgtgacctagtgtttcccagatcctttaagccaggctatttgtacattagtcaacgtcaatggaagtaaaatagcaaattgagtacagactgtagccctgctgcattgcccactctgtcatgctgaaatggattccttattctaagaagatttgctgtgaaatacagtctatttacattaagaagacctctgtatatttaaggcataattgtttcagggccttcattaattcttgaactgcaagacctagattttcttttcttgtatcttttctataacaatggaagtcaggagtttccaaaaaaaataacaaattgttcctcattaaaatggaactgaaaatggttttctggaaatgtgctttacaaacaatgagagaatctgattgtaaatcaactccaggacccagctgtctcagggtccaggctgggaagctccaggataaaaggtagtctgtatttttatggaaaaataaaacaattttttacttccgtaattgatgaagtgcttatcttgtcatacaattttaaagtcggaagagatctcagaattcatttaatccagccccttcttggaaaataacttcttccttggtatctctgacatatggacatctagtctcttctagaatacttttagccatgggcaactcactcctttttcagaaaaaattgtggttaaacatatgtaacataaaattactttttaaccattttaggtgtgcagttcagctgcgttaagtacatttcacattgttgtgtaatcattaccaccatccaatgccagaaatttttcatctcctccaactagaactctgacccattaaacactaactctcgattccaccccaccctgcctctgcctcctggcaaccatcattctactttctgtccctatgattttgactagtctatgtgccacatttaagtggaatcatatagtatttgtcctttgtgactggcctatttcagttatcataattgtcaagattcatccatgttagagcatgtgctagaattttcttcctttttaaggctgaataatattacattgtatgcacatgcacattttgtttatccattcatctgtcaatatacatttgggttgcttctaccttttggttgttataaatgctgccatgagtatgggtgtgcatatttgagtccctactttcaattcttttgtgtatatattcccaaaagcaattccagaagtggaattcctagattacatggaaattttatttttaattttttgtggaactgccatattgttttccacagtggctgtaccattttacattcctacgagcagtgcataagcattccagtttctccacatttttgccaacacttgtcattttctgtttttgtttttttttttttttaaactctttagcgttgtaatggcatggactttggctttgaaacctggctcagccacatactaggtgtgggaatttgaacaaattatttattctctctgagcctgaggggtttttttggaaaatgtgggtaatggataatattaattttataaaattatgaggatgaaatgagaaaattcatgtaaaaatacttagttcaccatctgaaaataggaggctatcagtgaatatttgctctcgtttttttcgtggtcattgattagtccattaaatttagggctactctgatgttagactgacttcttcattttgaattaaaacctactttggtgtaactcctgtagcttgtgtaacagttgcctttaattcatcattcctgactctgctctttacaatgtcacatgataaataatatccccctcccacatgtcacctgtctgatatttgaaggcagctatcaagtattcactagtcttctcttgctttggtcgaacactctggtttccttcaactgtttcttaaatgatgtggtttctagatctctcatcatgtatatcagtcaattctggactacagtctagtagaataggataattggaaatcacaccatctctccccttattttggctttcctgccaaactgtgatgtccacatgaaagaacagatgcatggatatgcgtctctcaatcagttcaacacattgagcccttggccatggcttccatctcttactcaacctctccccttcctcattgctcagagtgcttgatgtctaaagcacttgctttcattgagtttaggatcaattataatttcaaattttctccattttgttttttctctcctgtcagctccttaagagagaccaaggactacctgttcccgtgtaccttcctcatggtcccactagcacccagcaggcatgaaggctgtacttttgaaataaaattcagtttcgctctgagacatggagctgtgtcttctgacacaatcacaaaaaccacagagggcattggctagagtttgagccttttctgttgctgaagggaatacctaaagacttgcccaggaagagaaggctagagtgggagagtattttggctggaactccaaggagcactttgaacgtgggtcttcagacatgaaagtgtagggagggcttcactccaccccaccctgtcctgtaattcctggactcttcaatgccaagcgaaattatcagtttctaaatttgcccttaggagggtgaatagagtgccttagaaataccagtgctgtttctgaaagttcccaagcagttgaaagaattctggatttacatgcctaactcatctaaatgtcttttctttatgagctcgttgacatccaagaagacttttcagttttattatgaacctttttacctttaaaaacaaaaatcccaaacctctattcctgagaagggaagttgtaattttgtcaaagataaaatatttgaatggtgctctgtcccagctcctccactgtgtgtttgaaaacctagttcctcatgtattatcctcccaaacacatgttatgtgtttacattaaaaaaaggtaaaagccagattctcttcctttctttaaaaatagaacaaaaacaaaacaaaaagtgaaggagagggaggagtaactcatttcttggcattttaatagagtacccagaatcctcctaatataaggcactattatagttgaaaggcatattaaaactatgtataaatgaaaaactctgtcttttaaaaattgtttatttattagactggagtgcaatggtgcaataacagctcactataaccttgaactcctgggttcaagtgatcctcctgcctcaggctcctgaatagcttggaccacaggtgcatgacaccatgccagggttttttgtttgtttgttttttgttttgttttgttttgttttgcttttttgtagagtcagggtctcactatgctatctaagctggtcttgaactcctggccccaaaagatccttctgacttggcctcccaaagtgctagaattatagactgagccaccgtgcccagcctaaaagccctatctttagtaaaggactggtagatttacttatgatggacatacatgagctttatggcatgagttttgtgacttctacattaaccactcagaacactgacaagctgtaaaaatattatagatcacagccatttttcagatatgtgcagttgccagattgctgatatgcagatcttattttgcaaagtcaaggcaaagtggtcccttcttagtttgcctgtttgccatatatgcatttggaatgatgccacactgcctggtgagaccccaacaaaggcattacttggtggcgtagaaaaataaccaatttccaaggaaagacagaaagaggcaggtcttcttcacccatatgggcctgttgtcttccaggtctaatttgggctatgtttggtttatctgtgtggtagacttcacttttcttacattaattatttgtgatctgccacctggggaagttggaaaacatcagaagttaatgctgttgggtttctttaaggagaagaaagaaaggcctagaggtgtctttgcaacaaagaaggtagctattaacctttaagggtgttgtagaagccagtataacatcactaatgtggttgtcatgaaatgcaatgacccttctctcttctgtcacctgtctcgcttgactaactctaccactcacatttcatgattcagtgtggagaacataatgtgacgaataggaaaggagaatgtaaacacctgtagtaatgtctgtctagtgtgaccaaaatccctgaccttatattttaacattgtaacttttgggaagaatttcttttgatacatgtttttattttatgaacttaaaaaaacccgacaacccttgtatatgtcagagtctgttagtactgtgtgatacattaaatagcagagaatggaacaaatatctgtggaataggttaattattattattattattatatttatttatttatttattttttgagatggagtcttgctctgtcgccaggctggtggagtgcagtggtgcaatctcggctcactgcaacttccgactccctggttcaagcgattctcctgcctcagcctcccgagtagctgggattacaggcacacaccaccacgcccagttaatttttgtatttttggtagggatgaggtttcaccatgttggccaggatggtcttgaactcctgacctcatgatccacccgccttggcctctcaaagtgctgggattacaggcgtgagccaccgtgtcaggccaggttaattatttaatgcagacttctgctcagggtatttgtgcttaaagagatggactgtatagacacatcctagtaaaaggcttgagttactggtagtttaaacagaagccactggtgaacaggggaaagaactattggttcaagtttaatttggcatctttttagcagtgacatttggcacatcaccctctaatccttggttttgtcaccaccaaaatgaagataataacacatcagcaaatgtttgtgaaaatgtataaatgtgctttgcaaactctcatggatagatagcatgttattagtatgattgctctgctaatgagtgtagactttgctgaagttctcctcctcctcttcttcctgcctcttcttcctgctcattactgtcacaactaccccttatgaatttgtgagccattagggtagattctgcatctcttaacccatgtctttttctgcctgccagtcagagtcagcaaatattagatacctaataagtgtccaacacgaaggatttaaagatcagtactcaaaatatacaaatatggacatgcagcgatacctaagtgactgtttacagttccccaaattagtatggctccctggggcagaaaaatcttttgtctacatttctaatgtctactcatccttaaaactcaactcaaaagtcagtatcccttggcaacctgagatgttcatttctgttgccctcctactcgctcttatgaggtgctctttctatggagtcccgtaaaactccgggcatacctcagaagaaacacttgtcatttgacagaggaatctttgagaattgaactctttttaataaaaattctcccattttgcacatggtatagaattttaagagtgcaaaaagatgtacagtaaaacatcctgcttgcccctgacttgaaaccaccagttccccttctctggtgtagacactgttcccaattttggggcatctcttttatagatattttataaagatgtatatttatacatgtaagagtatgcatacataatgcatattatacattccatatgtatctgtgtataagaacacacaagcacatttttgtttttgcataaattatattgttgtatacacactatgagtactttgcttttatttttaaacctaatgatttattttggtgattgttccaaatacagtgcatacagtttccttgtttttttataacagctgcattgtatttcattgtgaattttggatagccataatttatttaggtagtctgctattgctggacaagtaggttgtttccaatcattttatattatagacaatactgccatgaaaatgttgtaacaatatcatttcatgtatgtttgagggcatctgtcagattaaattcctagaagtggaattgatgtacacacagttattaacattttaaactttcatagatattgtcaagttgtaccaatttatgctgcttttgatataagggttcctgattgttcatatccctttcagtatagtgagttatcaaactcttcatatttccaatctgattggggagaaataacatctcattgaagttttatataacattttttatattatcagtcaggttatcatgtttgatatgtttaaagaccacttacatttccttatctgtaaattgtgcactcatatcctttgtccacttatctatttcctccttggattttttttctttctgattggtaggaaattttgcttactatattgtagccctttgccttttgagctgcaataattttgtctccctagtttgacatatgtcttttgatattaataacccatttatgcctaagtagcaattttttgaatttttgcaatcagacctcggcggggaccttgagcagtaggatatcaataactctcacgtgcttagccttccaataatggaacactagtcataaatggttaatacggtcaaatttattacctttttaaaggcttatagatttttgtgtcaaactttgaaaaggtcttcacactacaaggaccttgaagcagcaggtcagaaaaaatgcagacaatggagaaggcttgtggggaaaggcctgaagaagagggtcctcctagtggaatagctcacagtgtgggacggtgacatgaacttaagggagaggtagtaaagtgaaactcattgcattgcttctctctcccaagtgcttccaccagccacagcaaattcccccaaatacctccgtcatccctgactgaaaatggatgaccacattccatatgggaaaagtatacaccacctctgagcatcctcttatcagccagagatcaagttgcccatctcagaaggagatacacaggatcagacaggctgcctcatccatcaagtgcacagtagctttggtcgttcctgttcattgcagttgactggaaaggcctcctgaaatgctgatagctgtgggaggagggagagccctccctttccacatatgggcagatctttggcaaatccaaaggtggtcttgcatttttgtgaaagttcctatgcaggcagcgacaaacagctaggttgtttataaaagctgcaggtggaatgccatttcattttggatgtagatattgacacccggcaaccaagtcaaactgtttccatcagatgtaaaagccagaacagtcttggcaggttgatggctaatgaaaaggagttgcaaaattaattacatggaaaattatttttttttctaataagataatgaaaaaatacatactggattagggaatgacaaactcaccaagcttaaatagcagttgttattagctgaactctgtacttttggatgtgagaatatcattcttcccggatcattgtttgaaagagacctcctgtacttttgcctctctcaaatttgattaaatgagctgccaacacaagaccctgtcagactaagatgactctaataggcagttctccgtagcgcttcacaacaatgaaagtaagttcctccctccatttgtcttttgccttcagtttctcaaacttatttctgaatgcacaaggatttttgaaatctggtcagcttatttagtggaatgattatgggctttgcaatcagaaagactggatttcaaatcttggctttgtcaatctatggctttagattagttcttaacctcattgagccttagagttctcatctgtaaatggacatgtattacccacaaataattctatataacaaattaccccaaaatatagtgtcttaaaacaatgagcatttatttagctgaagaataaatgagctattatttattattatagctattatcaaaaaagattggttaggcggttctctgatctggactgagccaaggtgatctcggcacatgctattagccaaagcaagtctagattcaatggtacagaaatacactccacctcttcattggaggagatacaaaaagatgtggatacagggaggaataaattgtgggcattttatagtctactacactaccttataggaataaatgtgataatatagggagcatgcagctatcatatcacctatgcattcagaaaacgtctattgactacctactatgagtttggtgcaacattgatactgtgagatactgtgagtaacgtagaagaaagtaaaatctcatccccagcctcaagaagcatacaatcttattaaaaagatgtacccccaaagaaactgtagatcaccttacaaagtgcaaagtctcttaagagtggaacagataaaatactgtggggtttcagaagagggagaaattaaactaaaaggctctgggaagagattctcgtcccaacttatgctctgctaatgttttcctcgatttaactttgattattgatctccccaggctatcagtaatgacatggtgcaggaaacccagtccagacaggcgaaacattttaaactggtgcaatttcaggtgaattaagtatttgaacattgccagccatccagattctacacgcccaggctaatatggctggagcaaaaccatcttactgtcttgcaggatgatagtaatcctcttaaatttatctctctgattaagataatttccactaatccaggagtccctcaatcccatgaacttaaacacttgatttccagggacagccagaaggtataaatcacacttttaatatatttttctgaaaatagttctttttttcccccctttcacgcctcacagtttggagctttgaaataattgaattaacagtgcgctagagggggttagacaaaaacaaaaactgggaaagggactttaccagcagtgcagtagagagcctgagtggagccaggattgggtgaggagagatcatggctatgttctggcagttggtgacatgtcaggggaccttaggcaagttctctgcccgagtctgggtttcttcaagtccaaccagggtatgattatctcaggccttgatcctttgcatgtggagtcatgagctaatgtctgttctgtgtacggactttcttgaaaggaaaagtgctacctaaatacaaggtacttgtattactgtaaggtgcttggaatcttaatagctttctcaactgcagccaaagtgggcttctctttgtaaatgctttaagtggctgagaatcaaggctgaaaaggggtttgtttttctccccatctatgcctagagtaggatggctgcacgtttttagggcttgcccaatttgcccatttataatggagggctccacagacatcacagccattgaaatcctatgtaaaatagagaaaggctaagacaatactacacactgctttttgcaggaaaataattttctatgtaaaagtatagttgtctaattcagtggtcaaccaattaagagaaccttcaagttagacctaaatatttggctttgaaagacgttcaagaggtaccagttttgttgttggttaatattcattgagctgtctcaatgttgaggttgctgcccacactgaaattttatgacaaaagcaaaagtaacattttaattggctaactccctttcccctagactcttaaattacattaaagttctcagttcatttaaagctttttgtgtttttcagttatttttacagacatattatctgggtttccttaccctggtggtttgtagaggatcggtgctaggctgcaggttatgttaagactcacctagggagattcaatagtttagagacaggggtcgaaaaatcattattttttttaacatgctccccagctgagtttgggaatcattacattaaacactcttcaggctgtatctatggttagtttctgtatctatgattagtgttttttttttttaaaagtctttacccaattgtgagaactgctacttcgctaaaagtttaccatctgctggacattgaagtcatctccaaatattatcccagttaagcctcataacagtcctgcaaggtcattactattatgcccattttatgaatgaggaactgagtcttagaggtatgaagtaattttaagctggtgtgtaacagagctgggatttgtgtttgaacaacacaaagctgacacctttcatccttgtgctgaactgcctcccatctaacctattccaggatcatttagtagtcaggcaggacacaaagaaagcatgagacatgaccctccctctcaagaagtttactgtctgagaagaatgaaaggaagaacacatactcactggtggccaaaggaacataaaattaagtggaaaattgtaaagtagaaaattagggtaatttaaggttttttttttttgtcttttcaatagtaaactgagtatcattgaattagggggtttattttctttcctattaaattacatggttgttttgctgtgatttgaacatagtgtgaatcagaagcatccttctgtttgaggtcccaacatgaaaaatatttttattgatatcagtgttataatctttcaaggagatgcaatttgtgcatcaacatattctgttttacatattctattttgccattggtctctaaacacacaggttggagcagaaataatgtaacctgtacctagtaccatgttgaatggacaattattttatctttttcaggggctaagtgtaaactagaaagacaaaaggaactgaaagtttagaacgtcttagacaagtacattaggctaaccctccattcccagcagatatttatgttgctagggaaataaaagccagaaagactcagttctgattgaagaatcaatttaggaggttgatatggtttagctctgtgtccccacccaaatctcatcttgaattgtactctcataatttccatgtgttgagggacccagtgggagataattgaatcgtggggacggtttcccctgtactgttcttgtggtagtgactaagtctcacaagagctgatggttttataagggatttccacttttgcttctctctcatcctctcttgccaacgccatactgtaagaagtacctttcgccttcctccatgattgcgaggcctctccagccacgtggaattgtgagtccattaaacctgtttttcttcccagtctcgggtatgtctttatcagcagcatgaaaacagactaatacagaaatacagacgtatacatggccaaggccaaatcactaaaactgagggaggcattctctgtttccaatagaaggctcctttgagtatccaagtttgcaggcaaagacagatacgtgattatgacaggtgaagatgtacccactgtagaccatcttttctatgaagatcggagtctttcttggggaggtgctatcctcaccaggtctcagctcactgtttagttgtggtggaaaattctgttttattcaaaggaagaaattagattatccaggattccatgtctatctaaatatctggtttgccataagccacataagcctcatcaccaaaatctttggtcaggacaagatcctccagaactgtgctaagccctttgtccttcccaggcccctattgcagcatttatcatattatactttaattttttgtttgcttctctgtgttcctaccagaaaatgagctccatgaagtaaagaactgtctcaattttgttcaccattatatcctagcacctggctagcacttagctagtctggaacagaataggtgctcaataaatatttgttagatggatggatggatggataaatcaatgaacaaacaaatgaatttaatatcattaaactccaaatgaacataaggagttgtgtagctccttgtggcaatatagttttctaaactgtctgctaatatactatggctttaggaaacacccagtataacttcattcccattgtgtataggacttaaccaagacttcacttgtttttaaagagtcaagaacaaactctcagtctgtcatggaattgcagctgtgaaagcatcttccttgtgtctcttgtttcttttgagtggcatgtgactttgaattggccagagacaattagtaggtaatagatttttattataaaatggattataaaatatgaaatgaaaatgtacgtgggccatacaaaggggaaaatgaaatggcaaactccataagacaaagacagatgacacagaaagatgagtaagaagaaaaaattgcctggaggcactttttgggggaagcatgtttaaggaagggcagtcaagtggaaataggaaaaaaagagtaaagtttgttgatgtcattggaaacccgagatgtccacagctactgaaaggaaatgaaatggaacctctgtagggagctgagaccagtttctgagcgaagcattctgcagcatgcctcctcccttttatactctgtctttgccagcttcttctgaggccagaaataaacaaattattttattgtattaagcatccattgagtctccagtggcaccatggatgaatgagggagtgttaactttgggtccactcatttgaacttctccttggggaaaagcaagatatgaaccattttgaaatttattttaggactttccactgtccctaaggagatcctgcctccttagtaactagttgggatgtttctttcttgtctttaacaaacaaaacaaataacgacaaaaagaactagaaggccctggattggaaaaagttgctatggctgtagtggagtgagaccattactgagttatttgcacttcctccaatgtgccatggtctttctaatacataggtctcctcttaacccagaacaatctttcaaaggaccaccttcctgccctttgggattcctcctccccaaacgggaatatgtattcttcctcagtgatgtcttagaaccctgtgcctacctctgttgtacctctgatcacatatttacctcttatcacatatttacttttagagccatggcttattttaaaatattaaacacatttcccaatgtatttgcttattattgcttcttacatacaactcttccttctaaatgcagtttcctttttacaggaatgaataatttagcacagaagtctatgcatgggttcatgacagctttatttgtaacagccagaaaatggaaaccaccaaatgtttgcagcgaatggttaaacaaaatgtggcatgtccataccatggaatactctacacagcaataaaaacaaacaaacgattgatacatgcaacaaagtagatgaatctcaagggcattatgctgagtaaaagaagccagtttttaaaaggtcacatactaaatgagtctgtttatacaacattcctgaaacaacaaaattatagcaatggagaacagattagtggttgccagtggtcaggaatggttgggaggagggagatgggtaggactgcaaaggggttgcacacaggaaatctttgtggtgacaaaattgttttatcttgactgtggtagtggttactcgaatctacgcttgcaatgaaatggcagaactatatatacatattttaacaatgtcaaattcctggctttgacattataccataattctgtgagctgttaactattgggagaaactgggtgaagggtgcagaatctctctggtctttacacagcttttgatgtcttatggagacgtttccctcaaccccacccaagtcctgaatggactttcaagagtcctagcagcttctctggactgttaggagaagtatttccagcaccttcccacaggtagggcggctctcccaggctctagtaaagactttaggcagggagctcagatttcgctctggcctagggctacatcttggattattaaatgaacattaaaactgcaggccccagtccacagggcccatattcataggcaccttcagcatcggcgtccactttgtgttatcctttttggcaccaagaatttccttttctttccatctcagctatgcatcatatatttccttgtgacattttattcagtactcttcaagtttttagtctcgttgtggtgggggtggtggctaggggacagggaggctgtttttgtcaggtcttattgttaaccccatcacgctgtttataattgcctgtttgtggtcatgtactcctctcccaccagactgtaaggttttagaaggtgttagggaccagttcaacctttttttttttttttttttttgagacggagtctcgctctgtcaccaggctggagtgcagtggcacagtcttggctcgctgcaacctctgactccctggttcaagcgattctcctgcctcagcctcccgagtagctgggattacaggcatgcaccaccacgcccagctaatttttgtattttcagtagagacggggtttcaccatgttggccaggatgatctcgatctcctgaccttgtgatcctagcctcctaaagtgctgggattacaggcgtgagccattgcgcccggcctggttcgagctttttcatccgagttcttacacatagaaagtgctaatacatatgcatatataatgaatgaataagtcaatctctatagttccatggaagagagcccaagtatgatagttttaaagtaatatagttttcaagaatacagtctatttttattcactttaaagatgtgtgtcattgtggtgctttttgtagcatagtttctttaaatacaagaactgcatgtggtctataggttgaatttaatagattttaaaaaaggaacagcatctccaaagaggaaaaaaaaaggcatttaagtgtgattcaagaagtatttcctctcctcaccttgtgctgtgccatcctttggggattttagaattggtgaaacaaacattgatcgttgaggagcttggcctctggtattggttctccagctatgtactgcagagcttagagttccacaggggacctctggggctgaagggggtttaagccagggagcaagtggttatgtctctcagctccttcccccatcccccatgtggcacagttgaagatgctctggctttgccctcagtcttcctggatttgatgatgatccccctccctaccctgacaagctgattgggcagctgccttcattctgcctcaggttcatcaatcataaaatgaagataataaaggtacctaccttatagactgttgacggttgagaagatctctgagcacaagcagagtcttttggactttgacaaaacctaggcaccttttccttccttttttttctttttcttttttttcctgcagatctcaccatataacaatacaaataatagcacaaattttgatatattatgaatttttcttcaacaaagtaatggattcatcacatatataagaattatgctgattacaatgtaattacatggttaaaaagtgatttcgtactgcaatataggtagtgtgactgggtaattgagcaggggtttaaagttgcaggattgtgccatcttctttctttgtgactatattgataacttcatttagagattgcatcagaaatccaaatttgaggtcactgaggactagaagatccttgtagacattgagcatagtactttccagtcctgactatcccatataggatgaagaaaactccaaattttctctctcctcagtaagtcagccgagtccctagtgtggagaggccccctccttcaggaccccagatgtggggcaattgtgagcctagggctagagcatggctcaggttgactgaccttgcactactggggaatgtagcctgcctgtccttttaagttacagcagactcttacttttccaaacaggcgcctttggttgaggtgatttacctggctatgggcgtctccattgaggcactagggagaggaaagaaacagggctaaaagccttcaccaaacaacatctaaagtaacactgaaaaccaacagtctcaaagccatcagcatctttgactgttttcccgccaccctccaaatgatcacaagtggaggccttcttttaccataggaagaaagtgtgccccttctatgtgactgaccctggctgcttggaaattccttgagtgtctctcaaagctcggcctctgagaatacataccacatcttatggctatacacggcagaacatgcagctcagtgagaagtcagcatgtatttccttttgagccacctctaaagtctggctctatcttagaacttctgtgattttggcgaagccacttccctaccaggggcctcacttgcttcctctgaaaaatgaggagattgtatgacataatgttttaaacaattgtttaaaacattggggcattttccacagtacctgtaaacacaacaatatataaaatagataaaagtagagttgttccttttgaaggagggtctagagcctgtactcttgtcctctggaaccccaaatcctcttatgttcctctataaatagctccaaaaaatcccatggatccaaagaatataatttgataaatatgtcttgggccttgagggcccacccagttataacattctaggactcagtgagtggtcaagaaaggcagtggggtagccacttgcttctcttgcattcagcctttgcagctactgggctggccgctggtcttgtgagtatgcgcatgcctgtgtaacctcacgcatcactgaatcggggatacaggatgtggcatggctgggagcttcttggaagggcctccacatcctgtgaatgttgggtctttacctgccaactgctgagatgaaccagtaatcctttcggagagcacaggcttttatcaatgaggaggattcaaggcttactttttccttccttccaaataacactcccactgttgaggcttaaataccaaaaccttatggtttgcagaatcagtgccaaaaagtcaatcctccgagaaactgcaaagataatagcccctattgatcaaatcgggaggagaatagcttttgaggtttgccctcctaaaagaggtcgagaaagataagggttggagttttctaaaacatgcttggtttgctcaaattggataaaaccatataaaaacacttatgttcttagagaactggtgaccaattcaggaaaacctcacaaaatgaaaagactggcttggattagtgaggcatgtgaaatgcagtgtctttctaagagcatggtaaatgtgttatttcaaatacagacagtgacttagtagctaaccaagtacatccatgcagaggatggccactgtctgccttactagacaaaggagaggtatgaaagcccttgagtctctatgctggacactgtacaggagtcttttggtccattagttaatcattacctcagtcctttgctgctcccattttatggatgagaaaatagaagttaaatgatgttcagtaactttctcatgatcacaaaattaataagtgtcagatagtagtgttaaaatctggtgtgtatttccattaaatagtctactgtcttctaaatggcacatacacatttgctattaccataatgcttttggtgaagagaggctgccaggctggtggtaaatatacctggaaatgtctcatgcttttgccagtggtgaggcgaataggaatccatcagtggagatcctacagggtcaaaacttgtggccgtgtctctctctgaagccactggtggccatggaattgatggagttcagctgagatgtgcttgatttttctcacttaaacttcagttttcctttcagtgaagaaaaaaagcttattaaacatcactttgtgaggggagattattaatattcaactttctacataaaataatcagcctttattttaaaaaaatatggccttggaagatattatttttcagggaagttattcatattttaaaatattttatctgtttttattatcattttatctgagaagctgaacacgtggttatctaaaggaatggatcttgaagttgagaacaaaactccccagaatcagcacaatcacttaatgagcttgcgaattgaaattatctttgctacagcccaagaactgagtggtaattagtgtccagggacacgtggggaacaatttcagtgttagcagtgccaagaatctattcatttgtcattggtcccaaattatattcaatcagcaattcaactcagcttggaaaaaccaagtgacatatagctaactgtctataaaattaacactgtaaaatgaaactatatttctggctgtgagcagcagtaagatgaagctatgaaaatattgcatgtaaatgctgtcaaggttcattttaatcccaccactttccaacctatgcttccttccctgaaatgccgccttggctgccaaccttctattcccaagctccctgaagtctgggtgtcggggtgtttgatgagccttttcataggtgaaccgcagcagtccatactactgaaaacaagggctgtcattattgaaagagccaaagtgggtggcagcagcatggggctcagactggagttggggttggagtcatatgtggagggccctgaaatgtagacaattagctcttctggggaaagcacctgcacgaaatacccgttccccaaacaagaggttgataacagaagcactgctttccactgtggctttgtagtaagcatttctcctacttgggtaaaattttctttttgttttcatattttggaattaagatccctgccatactgcctatctgacatctggtccccttgaaagagtctatgctatttttggctcaggacgttggaggaaaccagggccactgtaggtggggagggtatgtgtggttcatctacttctttcccacctgcttctaggactaggaaagaggtaagccaaggaggtctgcacaaaccaaacaatccttttgtctctgctgtggcagggagataaactagaagtatgcctttgcaaggtctcagtgagtcaacatcctgttcttgttcaagcttagtcagtgacgatgacatgtggccatttggcagacagtcaccatcagtaaatatggaaatacgaaaaatgtgcttatctctgtgaaaaggtgaggccagaggtaaggtgaaaaaaaaaagccaggttttacaggcttgagtactggtcagcatgggctgccagaaggtgtggagtgctagagtcaaagagacctgggtttgaattgcaattcttccacttaataaagttcatcctgcattctatctcagatcaatttttagtggctacctagagcactgtgcttaaaggactctacgacagatcccaggcttaacaggtaaacagagccataattgattaaagatgcctacactggattgaagtaggagggattgacaacttgtatgccttatagctaatgaccctgggtcctctaaggtcctgtccagccctaatattctctagtaatgttctgagtgtgtgtgtgtgtgtgtgtgtgtgtgtgtgtagacatagcctgaggggaggttagtataaccccattacaatatattagtagcgtggattaaattttcaaaaaacaagaacaacaaccaagattatttgtatattacagtctattattaaagagttttaacagcccgtaagtacttctaacagtccataagtacttcatagtgtattatgtcctttagattattgatttgtatgtttgctttgattcatgatggctttgaaaattatattttaagttatttaccacaaatgactctctatattcaaatacttagctttcatttgtcttgacctaaaattccaatgtagagaaacgaatttctctattcacagaaatggtaacaattccaaacacgaccagtgaaattagttacaggagcaatgttgttcttccttaggaaggctattaaatttattagtctaagactggtctttcaacaagaaaaggagtttatgtttgattatgtgtggtcatttctgcagatttgttttcttgttaatgtagtattttaggggcgaggtgtattttgcccttgttcttttttttttttttttgcaatttccatttttattttagattcagagggtacatgtacaggcttgttgtgagagtatattgcatgatcctgaggtttgggcttccattgatcccatcacccagatagtgaacatactacccaataggtagtttttcaacccttgccccactccctctatccttttgtaattccagtgtctattgctcctatccatggtacctatgattttactcccacttataagtgagaacacatgatatttggttttctgcttctctgttaattcacttaggctaatggcctccatctgcatccatgttgctacaaaggacatgatttcattatttttatggctacatagtattccatggtatatatgtaccacattctctttatccagtcctctgttgatgggcacctaggttgattccatgtcttcgctattatgaatagtgctgtgatgaacatatgatgcaggtgtctttttggtagaataatttattttctttggggtatataccttgtaatgtgattgctgggttgaatggtaggtctatttttagctctttgagaaatctcccaactgttttccacagtggtggaactaatttacattcccccaacagtgtattagcattccgttttctctgcatccttgccagcatctgttattttttgactttttttgttttttttgagatggagtctcgctatgtcagccaggctggatttcagtggcaccatttcagctcactgcaacctccgcctcccaggttcaagcgattctcctgcctcagcctcctgagtagctgggattacaggtgcatgccaccaggcagggctaatttttgtatttttagtagagacggggtttcatcatgttggtcaggctggtctcgaactcctgaccttgtgatccacctgcctcggcctcccaaagtgctggtattacaggtgtgagccactgtgcccagcgtgactttttaatgatagccattctgactagtatgagatggcatctcattgtggttttgatttgcatttctctggtggtaagtgatgttgagagggttaatgtaatattttacattttaattttcaagccagtgttttgaagtaaaaatcttcaaatctggccaatagattgttcatttggatggcatctaaaatgcaggcgcctctactggcatctagagccaccattccagtctaataagctatgggattgccgtggtctctctccaaaggcaggccctttggaaatctcctctaatgcttctaacagcctataaattactatatttaatattgcccttgtctttctcccttcccttctttttcttttcagaaacagagctgtcagtcagtgctgaattagtgcctacctcatcatggaacatctcaagtgaactcaacaaaggtacacagtgggggcacacaggggaggcgaggaaagaggtgtggaactgtttttaatcctggcatgaccttctttgaaatcaactgtttttcagatcactgcaaggaggtgggggccaaaataaatccccagcttactttgtgatcatttaacattgaattacttgggattctattatttctggagagtttctttccccccctcgttcctttttcttcttcctctaaaatgttccacatggtaaaaatgcttcaagatgtgaaatagggtcatttctgacctttctgacactacatctagtggatcttatttaggggatttgattcagcccaagccaggattcatcagagctgtttgctcggtgacctttcacgatgagcatttgatgtgcttgcagggttcaggaccgagtatctggaatgtttgtaattgcctgtgcataaggatggcagcttcctttgtgcacgtggggaacaggtttctgctaggagattgttgtttagcattaattaagccccgccatatgttaagcattgggtattttataaagaccctatgtcctggagtggtacatcaggacacattcaaaacctctgcagtctggctcaatctacctttctagccttagttatctttattcccctttatgcatttccagccaaatttcgatttcttcttatacatcctgtgcttttctgcctctctgctctcaccttttcacctggattgccttctcttctttgccaatactcattctcccccttttgcaaggcaacaaattacttctccctcaagaccaagcataaaatttacattatccagtcttgtctaatccctccagctggaagtggcctttccctctttgaaactcccatagctctctttcttctctgttcttctcttcacattttctatatgatgttatggtgatttatatacttatctcacccttaagcttagaagttccttgtaggagggtttctatcttacttttttttttttttggtctccatcacaaaatctagcacaaactcttatttgtaggaaattctcaataaatgtgtgtggaatgatgagtcacatcttacctggtgagaagccatagccatacatatttgtgtgcaaatacattcagcaaacttactgagtttctactttagttcaggcatgattcaaggttctgagattacagtggtaaagggagctcaaaagtcattgtcataaatggtcttttatgattagctctctattgtctactgacatagtttggttgtgtccccacccaaatctcatcttgaattgtagttcccataatccctacgtgttgtgagagggaccaggtggagataattgaatcatgagggtggtttcccccatcctgttctcataataatgagttagttctcatgagatctgatggttttataaggggcttcctccttcgctgggcactcattctctcccctgccgccctgtgaagaggtgccttctgtcatgattgtaactttcctgagacctccccagccatgtagaactgtgagtcaattaaacctctttcctttataaattacccagtcttgggcagttctttatagcagcatgagaacaaactaatacatctactaatacattcactgtaagttgtatttcctctctgagaagagataagtttattttataaaacagcaatgggtgaagttattttgctggttatactttactaggcactttaggatggtggaatgaagtgagatgtcttttcaccttaaatcaaaggacatttagaatattttttctattgccaaatttgacctgacattatttttctattaaatattaaatcaggcactccatgttactcctctccacctccagcatcaaccacaatgcctagaaagcagattttcaacaaatatttatagaatatgtttaatggaaaagaagaaataaaagaccctgaacattaacttagtacctgctctgtgccaggcactgtgctgggtgcttttttgtgaacttattctgcaagttccttatggtgccaacagaaaaattatatcattgcacactgcatgttattgatcagattccagttatggcaatagaaaagcatcaatgtgtgctaagaaaggcagcagagccagcagtctagaacccagcctgccagacttggaatttctaccagaccagcactgtaattagtagtagttgcccattaagaaagtagtggtgtcaatagtatgaacctgctggctgaagggaaggataaaggcaggccccagactcctttatttgttcaacacagacttccagagagtatggatggctttctggaggtacgaggatgcttggcatcatctttctctagaaggtaattagtgtatattctttaatttccattttgaatgagagaggaagatcatttgttgatcaaaaccttatcgattcctactctggtctaggaactctatgaaaattaggatataaagataaaccaggcaaaggcccctgtcctccatgaactcagagactatttggaaagactgatagctaaatgcataatcaaagccttctggtcaatttggtagattgagctttcaagagacacttcttccaatcacagagagatactagtgaaatatacaatgaagaaaataatccattgccaagctggtacacaaagaggtgaaatccctaggttccagaaatgaagaacaagttcaatactagtacaatgatctttgaggaggaattaagcaaaagagtccatgataatttgaaaactatgggtactctctaaggcctagagttttggtatcccatggggataagagttggagccacaggaaacaaactccctgcgttaggatatgaatgaagaatgactggcctaagtatgaaataaggaaaattctgctgaggatgtgatacagaaatctatgaagcaccttgggccattgggatcacccaggagaaatcaaaacctcagcctgtactacatgtgggagtggggttgaggttcttctcaggtattgcacaagccacaaaccaagatggtaacataaaaacttggcctggaattgattaaactaggagacactgacagcagcaaacctaaaaccagctcttaaaaatgtctcaacatcctcatgcatgaaggttttccaccaaagacaaaattttaaaaatgaaaaccacaaaacaacaatggcaaactcctgctgatgttgagcttactttaaaaaattataatgcatacaagggaggggaagaaagccaccattagtaagggttagcagacaaaacacatggaaaagctcataccttagaaactaaacacagtggaccaatttgagagagtatatatgtttaaaacgtttcatggtgaaaaagtagaaaccatggggcaaatgcaagataatatgacaaaaaaggcatatttcaaaataactaaatcaaaattatataattgaagaatagagctatggaaattagaagtttatcaaatggtcttaaagtgatacactcaggtcaagaatagtagtgatctgggagacagatttgagataatacggtggtttagaaaatggacttgagccagggtgactgactaggtttgaatcttgactccactatgcgtttcctgtgtgacttttagcaagcctctcaacctatctgctttggtcttctcatttgtaagatgaggtaagaaaagcacctactgcatagggctgttgtgaaaattcacctggccagcaaatctgataaactcattggagagtaagaagtgatagctgttttgggttaatatggttattactttgggcttgatattaaaatatcatgcgtacttcaacagtctggtaaggcaggcatattttagggttggggtagacatcttagattctgataaatcatccctttctggccttccacactttagtgttcattcatacaagtgacatacttcttagcttggcaacacaagattctccatggtcttacccctactgactcttcttatcttacctcctgtccccatactcaatattcaatttatttcaataatctgcctccgattccctaaacataccattctctttccagcctctatacctttgttcatgcagcttcctctgactgggtttgttcttcacttggctaacccctcttttacttaagcacaccttgaacattccctccttccccatttccccgcagtgcccctaatggacatacttctgaataacacaggtggtattccttccttgttggaacctcctggaggaagagacagatgattaacaaatccttccatcaacccctttgaccatgacatcaacagtgctccaaattatggggtaccgtattagcctatgtctatcttgatcagaatccttacctcggtgtattgaaattatctatttcgtgcctgcctctttaaagtcagggtttgccttatctattgtctaacaccatgcagtaggtaacatgcagtaggaaacatggcattaaattatttgggttcaaatcccagttatggtgtgtaaatgcctaccaggcgtgaggcacctgctaagcaggttgcacgcatcatttgaattcacaccaccctttgcaatagaacagataggcaacagaggctcatttgggctaaaggatttgatggaggggaagtgccaggattcccaccaaggcctcagggccaggtccaaggaccatgtctgttgtgacaactgagtgcattcatatcccctcctcctgtggggcaagttccctcacgtggagaagcagtaaaatacaatccatctcttggtgggctttaatgccttcctcttcacccagctgctgtgttccacctgtcagtcccacagcagctccccagccacactcaggtcccagtgttctgttacatgagtccagtcactggcattaaccagttacctgtctatcctttccaacaggaaatgaaatttaaaagagacaaggccaccctggaagagccgctgaaagctactattgatgggtcaagggggtaatttctgaaacaactgcttcagaaccaaatactgcctaaaataaatggatctacaggggctcaacctcagcttccccataagagtgttggggtgggtgtgataagggcctatttccccttctaccatactcagtcacaagaggtttcagaggttctctatagaaagccaaatgtttcttttggagaaggggctggaaattgctcccataggcagcagaaatggagggaacctactacttaaaaaaaaaaaaatactgaggcctgtttccaactgcaaatagttctctgtgctgacagactatatatatatatacacatacgcacactatatatatatatatatatatatatatatatatacacattttgtcctggtttgccttttcaaatggctttctttaccaggttggagctttagcagggaagtgtgcagtgtgggtcttataaacatgggctctaaagttactatgactctgagcttccttttgctcacctgtggatggagatatatgtatctgttactgtattaatccattttcatgctacagataaagacatacccgagactgggaagaaaaagaggtttaatggacttacattcccacatggctgaggaggcctcacaatcataggagaaggcaaggaggaacaagtcaagtcctacatggatggtggcaggcaaagagagagcttgtgcagagaaactcctgtttttaaaaccatcagatctcatgaaactcattcactatcacgtgaacaacacaagaaagacctgcccccatagttcaatcagctcccaccaggttcctcccacgtcacataggaattgtgggagacacaattcaagatgagatttgggttaagacactcaaaccatatcaattacctaaggtggttttcctagccaactagcatgtctatgggattcatgcccatgttgtgataggatagctgcttgctcggtcacaacatacagatacatcttagactcagccccctggcctgcctcttccctcgaagcttcaccatcaaggcctatgaccaggttctctagctcaggagtggtttgctccctcttgtccccactctgttacttgatttgtccttggcacatggtctatttaaatggtattgactggcctatagcttagagcttgatgcttagctagtcagaatggggtgactgagtcgttttcttgtgctttaattgtatatatttggagctatgggttgaaggtggtattgtaaggatagactggatcttgccttggctcttggcacgtggcaagctgatgaacagtcttcctaggactggggtgtctgagagcttatccatccttgtgttccagcttcaaaactggtagctggttggggtcgtaagcaacatctttctaatattgatagcaccattttctttaaaggttgtcaccttgccattatcaactactaaaacacttagagcctctctaacctcatatggaaaatagaggagtgatatgtacttgaaagggctggtgtatgaattaaataaaatataaatctcatcacagtctctagcatatataggtgctcactactggtagttctcttgaccgccccctccccaccaactcccttctgtttcccaaggggagggcagcatgatttgaggaaacagcactttaacaaggaatctaggttctagttccagctcagctccatcaccaggtcaatgacctatttaagctctgggcctcagggttttcacctgttgaaagggaggcatcaatccttgttctggctgcattacccattttgagactccaatgctgcgtgaaccagtatagtagccactacccacctatgtctattgagaatgtgaaatgtggacagtccaaagtgaggggtagcatcagtgtaaaacacactggatctcaaggccttaatatagaaaagaaaatatcttactaataatttttacattgattacatgttgaaatgatattttcatatattgaattagtaaaatacattaaaattaatttatagtacctgatcccttttaatgtggctagcagacagtttaaaattacacttctcacttacatttgtggttcacagtttatttctattagataatgctgctctcaggaaacaattgctggaaccttaggtaaatgtaacctgtttcctccttgcagcaaaaggaaatgctctcatatccattccagctttaaaattctaggaactactttttataaaaagaaatgtttctaaacactgattttgtttgtgtgtgtgtatataatgctttatgtaccctagaacttaaaatataattatatatatatatataaagattttatgtgtaagggattatcattactgattatagtctgatcattattataactagattacaaattgaccactaatatgattagagacaagcaatatctggagtaatttctcatctgtggagaaaaatattgtgggttaaaaggcgaaaaacacatagggattattattttttttttcttttgagacaagatcttattctgtcgcccaggctggagtccagtgatgtgatcatggctcgttgcagcctccatctctcagtctcaagcaatcctcccacttcagcctccaagtcgctgggaccacaggtgcaccatgtccagctaatttttgtatttagagacggggtctcaccatgtttcccaggcttgtcttgaacttttaggctcaagcaatctgccccctcggccccccaaagtgctgggattacaagcatgagccaccacactcagccaggaacaccttcctgataggagagcagggatttggatatatgcggggagcttcttgcctgctgtatatctcctgtatccctttgctggcaaccagctcttattccctttgcttacacccagtatagaagcatgcaacatgaaaatcagttccctttgaccaagcagctctctctctctaagaccggtattaatcctttttgacaagtctattcactttagggaaaggcattggcaagatgagggatatggaattctatccggaaatagagggaaaatgaccgtttatggtccatcttgattcttcaaaacctgctcaaaggggagagatttgccatcagcccccctgccatccagccatcaatggagcagaaagggtcttcctcaccatgtaggggtctttccagccggttattccagctcttggcacccaagccctcccatcattcctcatctccccatctgtgctgttaggggggcattcagcctagaggaacgaggccctgtgggtgctctgcagatggctgtgtgagcagcatagaaccccacctccatcctcccagcaaccgctgccccagcccaggcaggtgagcaaccgagcaagcttggaagtgtttgtgctcctgtttttaccatttagaatgaggagagagcttatctaccttatatcttgagtctcagattccttactcccttggtactattttcagtaattactggctaagacgaggcacatttctggactcataaataataaggcagtcacagagaaagagtgtctggctttttcccaggctgttttttccttgcctgtgtgtcttttagtttggatttaagcctatctcctcctgttgcacccacttcaaaaatggctttacagtttggcctcaaggtacttccagaaacctatggactagggtcctgctcacagggatcatggaagtctttcctagccctgggcccacagctttggttaaccttatctaaagacttgctgggactttcggacttaaaaggtctgcttggctaaagggaggggaaacggagattatacaaagtgctttaccatggggctcctccctcagtttcctgcttctccttctccacctttgcttgttgtgctctaaaacacaacatcctatttcaagcatctgtgcaaaccttactatttgctctgatgagaacaccctcccccaaccttttgtcattgttaaagacccagctcacacttcaccacttccaagaagacttccctgactccaccttctcccactgatgatcacaccttgttcctccccatgccaggtgatgcttgtttgcatgtatgttcttcctcttcttctccccattcttcttctttcctcatgcaagaaattttattgaagatcttcgtcatttcaagcaaggccctcatgtgtctcccattcaaagagaggttgaccaggaaaagcagtatggagagggctttgagagagaaaagaacagcgtgtcaagctgtgaacttcttgagatcagaagtcatgtcttctttatgcatccttatctctccaacatctagtgcagttgtttgaataaagagagaaatgaatgagtggtgaaaatcagaatacgggagccgaaagttactttagagtagctgtcctcaagctttggtgggtgttagagtcacttggagagacccgggttcgttgaatcaggctagaccctattcccctccattgttaccatcttccaggtgactctgatgcccactaaagtttgaggaccagtgatagagcagtaattcttaacctcagctgtaattggtatcacctggggaattttaaaaattactaatgcctgggtctgttctcctcctcccctcattcttattttattggtctggtgtatagcctgtgatttgagaggtttaaaaggtctccaggtgattctagtgtgcaacaaagtttgagaatcactgctttagagttcttctaggctaacctgccttgtagtttgactcttcatgatattctaacaagtgattaatacaagtataggtgcttggcactttgtcaatttctgtcctcaattttctgaggtaatgtagacaagacctgggcttggagtgagaagtccttggtttatatttaagctctgtggctaactccagattcttgaatattaagatctggattttttcccccatctgtaaaatggggagaataccagccttcaagtgttgttgtaagtacagaatgtaatgacatatgtgagacggctaagcacaagccccagaactcataaaataaatacagaaaagggtagattgatagtgatattgatatatttttaaaatatctgaatgtgttggcataactccatcacttgttccttatggacatcgggagtaacacctccctttctcatgaaataataccaattattaatagctaccatctatcgagggcttatgatatgccaagaaccatgttaagtgatttacatggattgtcacatttaatcctcataaaaattctgagatactgtgacagatttacagatgaaaaactgagccttagggaaaagtcgtattttgaatagtgacatcctgcctgcaaaagatgtgtccatgtcctaaactctggaacctgtgaatttttctttatttggaaaaggggttttgcacatgtaattaaattaaggatcttgagatgagattatccgtcattatccccagaagcctaaatgcctacaagtgtccttataagacagagacagagggagtttttagatggacccacagaggaggaagcaatgtgaaaatgaaagcagagatcacgtgatgcagccacaagctcaagaatgccagggccctcagaaactaagagacaaggaatgaattccactccagggccaccagaaagagtgtggctctgctggattttgtacttctagcctccagaaatgtgaaagaataaattgctgatgctttaagccactaagtttgtgataatttgttaaagtaacatcaggaaactaagagagatttaagcaacttgccctacgtcacaaagcagtgaacccagaattcaaacccatgttcttaatcaatatattatgttgcctttaagctgaattgaactttgtaataaaatgtcttaggttcatttattcaacaaatgtttattcagtgcctaccatggacgaggcctgtactggctgaagatacaaaaatgaaaaaggcagaaacattcttccctttggatactctacaatttagtggaagagaaaaactttagacaaggtttttcacatacacagaaatactgaaaatcatttaattccagcaatgataggtgctgcaaaggagatgaatgaaaaaataagacttatcctggaatataggatcagatccatcctaggtaggcccagctaatggctgaggtagaggtcagctcttcattccctctggcctgtttactgagggtttgagggcttacagctccactttagccctcctgagcttgcagaagttggtccacaaacagattatttggggataaagacccacaaaagaagaaaggcagtaaagaattcagcagacggcgagctctgcaacccgttgcagacattattatgaggcagtggagtgtgtgaaaacttcttttagacaaacttcgaaaatgttgtgttcctgtaccaagcaagatttcctgtagggtcatgagaagctcactaatcatctctttagttccaagctatattacttcagggaagtttctgtcaaggcttcatgcttaagtatctctttgtctgggtttattctgtcaaatgcttatttgcttaaaaaaaaaaaatgccccaagccttagttgatctagcagcttaggaagttcaaatccccgcatacctcagaggcctcctagcctctgccctaattgctgcaaataactcatgatttcattatctgtgggcccaaagtcagaccagacgaactctggccgttggactatggttgtatagaattaaaactgacttacaagatttttctatccatggtctttacttgtcttctgaactcagagacctgaattcttcccaaagatccttcctaggactctaatttcaaccccaatgtcctcaatagttacattcacttatacattcaacaggtatttatggagtaccagtcatgtggcaggcactgtgctgatacagaggtgaaaatacaaaattcctgtctcatgaacctcactttctggtggagttagcaaatccctgtgtgggaagtactattatacctgacacttcctgagcaccatttaatgtgccataaaaactctgcaaggtaggtactattatgttcatttcacaggcaggaaaacaagttcaaggtaaagtgacgcagctagtaaatggcagagccagaattcaaatccaggctttcctggctaccaagtccatgttctcagtgactatttatttctaaaataataatctgtgtgtatagggaggaaagaaggaacaggcttagaaggctttttgctggtaggatatcctttctggaaggggatattcttgattacccttaggtggtttttcttatttgtcttttttctttgattttcatactttctttaataaatatcctatactcttatagtcagataaaaaataagtagaagacataaaaattgtaaaactcatatatacccccaaagaattgaaaacaggtattcaaacaaatgcaggtacgcacatattcatagctgtattactcacaatagccaaaagatggaagcagcctaaatgtccatcagtgggatgactggtaaacaaagagtggtacagacatacaatggaatattatttggccataaaaaggaatgaagttctgatacatgccataacatggataaatctcaaaaacactatgctgagtgaaagaagccagacctaaaaggtcacgtgtatgatttcattcatgtgaaatattcagaagaggtaaatgcatagaggcagaagttgaattggttgccaggggctggctagagtgggagaagggagcaattgctttataggtacacactttccttttgggctgccagatctgttttccaattagatagaaatggtggttgtacaacattgtcagtatattaaatgccactaaattgttcactttaaaacagttaattttgtgttaagtgacttttgccaaaataaaacaaaaataagaaaactctaaataaacaaaacagtcacaatgaagagctttggtcttgctattcttctgtactgccaggtctctgagggctacaaaaatgaatttaacattgcaacgctaactgtttttacttagtgctacagccccatttccccgtaagagccctggcatgtccactaataaggtaaccccaggccattcactaaacctctctggacttcttgtgtcctcagttgtcacacaagggtaaaaatgtctacacgaagtcattcccagatcctaatatgataatgttgtgcttcgtaaaatgtaaattgacttgaatatatgtctctttatttttacatcaagaaacagtaggtgatctgaaattatctctgcttaccaagcatctgtgttaaaagaactgtgagcataaggggtgaaatcttggtaaagtgtctatttagaggccatgctttctgttgatgttgacattgctgttttttgtttgtgggggttttgtttttgtttttactttataataacatttatttatataaaaaggaatgtttgggctggggctaggagaaatgttgaggtaatggaaaactctaataatgcgatcatctattgaagacacgagctcagggaaagcctttctactggtgacaggcatttttctgctaaggattcccaataggaatcaaatactgctgaagatagtagaatcagacttttgtgctggatcgcaggtaaaccctgggtagaccttgagatactgcccttgcagtggtgctgagtaacagaaggatgctagcatcctgcatcgagtcagaggagctcactgtagcccatccctccagtccacccagactagctagacagtgccttcttagctctcagcagccctcatcctactgagagaggaatttggagaagacctggggaaaccttgaaagaccacctcagaatccagctaaacagcttgggtcctctttcccagggccagttgaggcaggagactaatagcaggaagagagatggctcccagctgttcagctcttttaaggtaaggtgggcctgatgtgtcacctgtactgtttattgcccttatccttaaataattttcttcctttaaaaacaaaacaaaacaaaacaaaaaactagctcttgcaatatctaaacatatttatttattgtagaaaatctagaaagtaaaatgaagccaaaattatgttactgctaacagatactgtttgtctttttaatgcatatatttttacagatatatttactgaaaaggaatcatattgagccattctcttttgtaaacaacatttgtcccttagaaacaaattcgcaagcatctttctgtgtcattaaatatttttaacatcatttttattggccatattaaatgttgatatggtttggctctgtgtccccacccaaatcttatcttgaattgtaatccaaattgtaatccccacgtgtcaagggagggacatggtaggaggtgattggatcatgggcgcggttttccccatgctgttcttgtgatagtgagtgagttctcatgagatgtgttggtttaaaagtgtgtggcagttcctctctctctttctctcctgtcaccttgtaaagaaagtgcttgcttctccttcaccttctgccatgattctaagtttcctgaggtttccccggccatgtggaaatgtgagtcaattaaatctcttttctttataaattatccagtctcaggtaattctttatagcagtgtgaaaatggactaatacaaatgggagctgggcgcagtggctcatgcctgtaatcccagcactttgagaggctgaggcaaatggatcacctaaggtcaggatttcgagaccaacctggccaacatggtgaaaccctgtctgtactaaaaatacaaaaattagtagggcatggtggcatgcacctgtaatcccagctacttgggaggctgaggcaggagaatcactggaacctgggagacggaggttgcagtgagccgagattgcaccactgcactccagcctgggagacagagtgagactccatctcaaaaacaaaaaacaaaaaacaaaaaaaacaaaaacaaatgtgttccattgtagaggtattcagtaatttactgaacctattatcacctattgttgaaaagttagaattattctagctttgtgttataaatagtagggtgatgataaatgccttaaagggcccaggacagtacctggcctcatggaggtacctactacacagtgttctcttaaatctctctgcatatttacatccctagcaacagtgcaggagaatgtcctattctactactacttaccttcactcaaactaagtattgtcattttcttggttgttgtcaattttaaaagcaaaaaaatggtatgtcattgttattttaaattccatttctttgataactaaggttgaattttttatgtttagtagccagtttatctctaacatattaatttttctcattctactattaagatactgatcttttgtttgaaatctgcattttttctagtttaacttttaattttgtttgcatgtatattttaacatggaaaaattttatttttatgaaattgaatctatcaatctttggtgtcatgcttagaaaagccttccattctccaagatgatcaaaacagtcacttatattttctttaaggtgttataagtaatcacttccttttcagtctgaatcaaattgagcaatatttccacccctaggaagggcagcagattagtctggtgccagagacaacttttctccacaacctagactcagggaatctccaagttgaatgacctctagaagtcgtataatgtgagctcctggctgataacgtgattcccgtcttccagaagcctgataagtggtggttcctcgcttctgtactactggtgggagtataaactagtacaaccactatggaaaaaacagcatggagattccttaaaaaactaaaaatagaactaccatttgatccagcaatcccattacccagaggaaaagaagtcattatacaaaaaggatacttacacacacatatttatagcagcacaatttgctgttgcaaaaaatgtggtatcagtccaaatgcccatcaatcaatgagtgtataaagaaattgtgagatatatatatatgtatatatacatacacatatacacacatatgtacatatatatatacacacatatacacatatatatatgatagaatacttctcagccataaaaaggaatgaattaatgacatttgaagcaacctggatggaaatggggactgttattcaaagtgaagtaacacaggaatggaaaactaaaccttgtatgttctcactcataagtgggagctaagctatgagaatgcaaaggcataagaatgatacaatggactctggagacttgggggaaagggtgggaggtgggtgagggataaaagactactaattgggttcaatgtttactgcttaggtgatgggtgcaccaaaatatctcaaatcaccactaaagcacttactcatgtaaccaaataccacctgttcccccaaaaggtatggaaataattttttaagtggcgtttccttctagctcaacactttcttaagtgacattacacaagaataacctattcttctttttgagaaactctaaaattaggtaggcctttcttatgttgagccaacttgtcttcattctcactcttctgtgttttattccctcttctgctcagaaagtggctgggggctgttctctggactttgcagtaagattggcctgagtttctaatcttatactcagtagctgtatggctttgggtaaattacttgatcactttgagctatagttttatcatctatgaaatgggggttcaaaaattactattattacacattctaactttgagacagacaaagctaaatgctggagcaagtgggcatcaatgctattttatttagcagttatgtgtggtcattttagacttgattatgactcaagttttcctttagttctatgcttctaaactgtgtatgctgtattcaaagcagtatcttgtagtataatttatgcttaataaagaaagccaaaatatatctgtactagtccattttcacgctgctataaagaactgccctgggcttggtaatttataaagaaaggaggtttaattgactcacggttccacatggctgcggaggcctcagaaagtttacaatcatggctgaaggggaagcaggcatgtcttacatggcggcatgtgagagagagtgtgtgaacgggaaactgtcaaacacttataaaaccatcagatctcatgagaactccttcattatcagaagaacagcatggggaacctctcccatgatccaatcacctgccactgggtccctccctcaacacatggggattatggggattacaattccagatgacatttgggtggggaccccaaccatatcaatatctctagataaaattgtaaatactttgaaaagaagcaagaaggatcaaaatcagtgtcataatatattaataccaacaatctgttatgaaacttattgttacatagatgtgtcctcattagttccagtgttcctttgaactttggataaaatgacaaatagcctttcagaccttgtctgtttttaggtagaggacctggtatatggacacctaaacctcatgaggttgatttgagaattacaggagatcatgcagagctctgatagtgcattttcattatgatgttattgcccacagaatctcttctttctctgactaaagtttccattcatttcattatccccttcctagcttgttttccagatccttccctcataaaaggtgggctcctggagtgagcacagaatactttgtgctgccacttcattttgcactttttttctgctaattcattttatgcttttatttctcaacctaaattatctgctgctccataacatcaacttattaacttattgttgacttttaatcaatggcaattaactaaatctcctgtgagtttcttgcggtttttaccattcacttgcatctcccttttctcatactcattgtttaattctcatctctcattgtataatcggtgttttgtgtcccagcactcactagaagctattcctattatatttcaacatgttagatttgtcatattatttgatgctatcattttgcatgctcataacatcccaactttgtgtatgatattaatttcgttctttttctttttttttttttgaaagagtctcactctgttgccaggctggaatgcagtggcttggtctcagctcactgcaatctctgcctcccaggttcaagtgattctcctgcctcagcctcctgagtatctgggattacaggcacctgccaccacatccagctaatttttgtatttttagtagagatagggtttcaccatgttggccaggatagtcttgatctcctgacctcatgatcttcctgcctcggcctcccaaaatgctgggattacaggtgtgagccactgcgcctggccttaatttagttcctatctaagatgttgatatggctgttggcaggaaaacaatgtagacagagcctctatcatgattataccttgtcttgttgccagtgtggagaactgcctctcttctcttacaaatgcatgtagtttagattttttaaaaaaattcttttcactgatttcagcatcttcctgtttctctgaactttaaggtcagcattcccattttgtcacattaattcactcaacaagcatttgatgagctatgtgccagttactgtggtaggtgcataaataagtaatatgcatctgtcctcaagatgctcacagtctagtggaagaaacagatcaaatgaattgggcacataataggtttggggaagtttgggtaagactttgtggaggtgacatttgagttgggtattacaggatgcatgggcgtttgctaaataggaagcagatcaaggacacatctggccatgacccacatctcctctctttagcccacatgaatgccaatattgcatgcatattttctctcacagttgctgctgtttttctgaaagcagtgttttctcattcacaattagatttttgttcttggcattctagaagatgcaattgccatccagaaatgctaagaagaaaaaatatgcaccattctaagaggacttaaaaaaaattttttagatacatagtaggtgtatatatttatggagtttttgagatattttggtacaggtgtgcaatgcataataatcataccatggaaaattggttatctattcccttaagcatttatcctttgtgttacaaataatccagttatactcttttagttatttaaaatgtacagttaaattattattgcctataatacccctgttgtgctatcaatactaagtcttattcattgttttaaaaatatggaacacttcatgaatttgcctgtcatctttgcccaggggccatgctaatcttctctttattgttctgattttagtatatgtgctgccaaaacaagccccagaggaatttttaaggtgtattcagatcattgaacatcctatatcactcttatgtcttgtttcagtactagttttatgatcattaattatcgtatatttatattaataaaaataatatttgttaacatttatagagtaccttccacatgctgggtggaaggtacttaacctaccatccttctgtgaatagtacctgtgaatcatacctgtgaatggtaccttgcatatattatctccttctaccattaacaaagaagaaatctgagctcagagaggttgagtaacctcaggtcatgtaactaatcaagcagcaaaacagatttgaacattggtttctctgtctcctaagcctgaccatttacattttcttattctaccccattggtcaatataccctctgactctcttccttggtctttacccattgattctcctcgtaattgcccttcgtattagtctgctagggctgccataacaaagtaccacatgctgtgtgacttaaacaacagaaatgtattgtattacagttctggaggctggaaagtccaagatcaaggtccagcaggaatcagtttctggtaagggctctctttctgccttacagatggccactggcgtcttgctctgcccttacatggcagagagagacagactgacagagagagaggtccttatatttttatgaggccaccaatcttatcagattaagaccccaccctgattacctcattaaatgtcatctcctaaaaaccctgtctccaaatacagtcacatcggggttagggcttcaaccctaactccaatataaattttggaggaacacagttcagtccattgtacctttcttaaaacatcacatgtattttcatttctccatggttttgcttatgctgttttcccagcataagctttctgtcttttaaaatctttccaattattcattacccaactcaaatgtcatttcccatgaagccttctctggttttccagtcaaatttagttgccctttcacctactcaataatgatttttttgactgtattttgattgagcccctattttacccaaactacattatatacttaagctccttgaagttagggactctgccttaatatgctcccagtttgctcccaattttattggtactccataacatttatgacttgagtttttcattagctctaaagaatgatggaggcaattgggtgggtgtaggctagataagagaaatgcttgtgcccatctccaagtgttggaagtgatgccttacagaagacagaaaaaatgttgcttgaggggtttagactgagaccaccaggtaaaagttacaaagaagcacacttctgcccagtttatggaagaactttttaataaataacaaaaaggtgaaggaaactaacactcattgataatcagttgctaaactgctgctttacaatttccacttccacatggtcctataaaatagttcccatcttttatagatgagaaaaccacatttccaaaaagtgtaaagatctgatataagatcatgtagcctacctccgtcactcattccttcatggagaagtaatctccctttctctagaggaattgaagccatctgcatgaccagttttcaggaatgctatatcgagaatgctctgggggtgttggtataactaatattttagttttctttcatctctaaagtcttctgactcaggaattctctatccctgacatagacttaatggaaatagacctataaaacctaacttctcccatccctttgtgggtaatatatattagaaaacttatatttagattattacaaattatctttacattgtttcatgtatgttggtccagtgaattaggggtgtgtgtgtgtatgtatgtgtgtgtacatatgtatgtgtgttttgagacaggatctcactcttcgcccagacatgatcacagctcactgcagcctcaatttcctggcctcaatcgatcttcccacttcagcctcctgagtagctgggattccaggcacacaccaccatgcctgcctaatttttgtagagacagagttttgccatgtttcccaggctggtcctgaactcttggacttgagcaacccgcccgcctctgcctcccaaaatgctgggattataggcatgagccaccacgcccagcttctgtcagttagtatttatgaagctgtttggaggacacagcttggaaatatccatactaacaaaattgacttggttctgaccagtagaggctgtatttttcaaccaaaggctacactgtctggggaagaaaatggtaatatgcatgagttgtccacgactgtagaagtcagatggatgaggtacttagccttgctatcctgagtacattccatgctgaaggtgggtcccagcagcctgagccccccagggtcagcttctggggcaggcagccaatgttctgatgtagctgccatttttcttggatgattcatgtgtgaaaatgtctcccccaaaagaatttgggtcatcttgttctttttcccaaagccaggctcttatcagaccagaagagtctcttcatacaaatggatcccagttgggaagtttatgaatgttaaggatagttgctcattccaaaatacataaccctttttgtctgtggcatcttatatttgactatattgctttttctactcaacagaattggatcttagaatcctggagctggtgtatgtgtgacttcagagataacttaaaaatgatcacgtatttctgtcttctaaattcagatggtttaactcattatttcttttttcttgtgaaggcatagccttgaatttgaacacagcttttgcttttgtgtgtgtgtgtttgtgtgtgcgtgtgcatgcactataacattttggcttgtgctatgaaactctttttttttttctggtcagaagaaagatgacaacactgaatcaactgccagtaacatccaaaaccagttcaatattaccccctggtttcttttcctaggaaaaatatcacaggtatcttcctcctcttccattttcattatacaaaatatggccgggcgcggtggctcatgcctgtaatcccagcactttgggaggctgaggcgggcggatcatgaggtcaggagatcgagaccatcctggctaccacagtgaaaccccgtctctactaaacataaaaaaattagccgggcatggtggtgggtgcctgtagtcccagctactcaggaggctgaggcaggagaatggtgtgaacccgggaggaggagcttgcagtgagccgagattgtgccactgcagtccagcccagttggcaaagtgagactccgtctcaaaaaaaaaaaaaaaaaaaaaaatgcaaaaagcaaaatatgttgttcctgcatggagattgggggaggaagagaattatattttgcagtgtcttgcaaggaataaataccatcaaaacacttgaatatgaagttgacactactttggaataatgtagcccattgtgcctgaagcttaacagacatgacccaaagaaaagaatggttcacacaatatcaagagtactttgtggcagaggtgggaccagactccatcccctggtcctcactgcacagccttataacatcatagcttctcaaaagtatcctaagattgcaatggagaccagaccaagcagtcagccccatcagagcttggaggatgctatcagggaagtgtatgtttgtttcttcttaatcacagtcctattgtaagcctcaaggatttaggacccacaaaaggaaattctcaatttccactgctttttgtactcaacttttaaagtcaaagatggaaaaggtaagaaaataaacaagagactttttttaaaaaacaatattctgtatgacaccacttatatgaggtacctagagtagtgaaattgatagacagaaagtaagatggtggttgccagggattgggaggaaaggagaatggggagttagtctttagtgggcacgaggtttcagtttgagaagatgaaaaaagttttgggatggatggtggtgatggttgcataacaatatgattgtacttaatgccactgagctaaacacttaaaaataattaaaattgtacgttttgtcacgtatattttaccacagttttcagaaagtgcaacgtccttggtataatctggaatctccatacccctatgcacatgcatccccagaaacaggatatcgtattctaaagaatgataataacaaatttatgctatttttaattcaccttaattttgttgttttcaaaataattgcatatacgtggttgcatctgacagtcaccaaaactgggagaaaagcataactgatcttttatttcacagatgagtaaactgaggctcagagttacactgctgacaagtaacagagtggtactagaacccaggacttctgacatgtattcctggagccatgcatgatcctgtgtaaaagttctaagttgatacttaacatattttacttactaatcttagaaaagagactaacacattttaaaaggattttcaaaaacttgaagtggtttagaggttttaagcatgaaaataagttaacttagttacctcattgtctagacatcctgattaatggaggttttactatatagtaataataatgacaaacccttatatagaacttcactgtgcaccaggtactgttctaagtaccttaagaacactaactcatttatcaaaatgtactatttgtatttaaaatgtataatgaaatttattgagacttgcatgtgccaaacactttcctaagtgctttatacactttatctcatttaatccgtgtaacagtctgaagcaacaggtaatactagagcttggagatgtgaaataatttgctcaaggatacatgagaacaagtgacacagccaggactcaaacccaggtccacccatctctttactgtgattcagatggtgtcgtgtgtgtctttctattcactgttatctctaaatgttagttacgtcattcaggcagctggagcagtgtccaagtagggatgctggttggctcatagtttacttcttgaagacttctaattttaccctgaaattctggctggaaatttgattccattgctgaaaatggaagaaatacagctttcatgttcatgcacaatttgctttttcatttttttttttttttattatcctgagacttactgtaaatcacactttcccatcagtcctgggggttctgattatgttcatggggtctagctaagagcaagggcagtaaattactgccactttgtttgaaaatttttttagccacagtacattagctgcttttgtttgcttttccactggtggtgtgcccatttttatttcagaatttttgtttcttgaatgtctcatttgtgaataatgtagcttccaaaatggaatgattggagaaaaaatatgaacgagggtgtcttgtttggcacctgtaagttttttaagcatttatagcaaaaatgaattattgagtcccccctctttctctctcatactctctctcactcactcatctgcattctctttccttcctattctctccattctactccatttcccaaaaaacaattgctagataatgaccattatggtggctaatatcaggtaactaccaagaagtgccttcttccaggcttctgtaagtattcttgtttatttgaaagattgatagatcagagggtcaggggatgtgttttattgtaagtttctgttccaaatttcctgacattttccattaaaatatataaataaataagccttttaaaaggaagaaatggaactaataagaaccagaccctaaagtgatggtcaaaatgtcaaaaataactgcttttcctttattcagtatcattaatctcgaggtagatacctacctttccatagactctccctaatagcttgacctgattctcttgctgggctattcacaaatagagtgacttctaaagtgacaccaaaatcctcagtagctcttcaggaattggtgtgggagttcagtggcaatattttcatatgtttttcaaatcacatcttttggtaaagtgatgagaaaggaggctgtggcacacactagcagtccagagcacaaggccccctcatgagtctccatcatcataatgtttgtgagatcatcctaaaggtgctagaaaatagtgatgcttgtgtgcaacctagatgaatttgaaaattaactgattttcctcaagtttgtcagagtttctaaagtggctttggaaagggttccattgcacacgaagaggaagcttaagttagacaatgtttgtccttatcaataatccatacaaaaattgtttatttcattttcttggactttatatgcgatacctttcagggaggctgcctacctcataatagccctctgttgtctgatagctgctttcacgacccatcatgaggggccttcagcagccatgtttgaatttataaccctgtccttctggtgagagttgattggaccagggagaggacacctggcccaggttacgccagagtctctttcccaggaatttgcaattggaactcagaggtagcctgttagtgtttgtcagttgctgttagtgccaagagatcaatctgggggccatagagtgttgatcttctactgtgtgcatagaaaagccaagaaagctggttttcaaagagagatttaagcagattcataaagagaattagagtctgggggtggagggagattcctgatctggttcccggcagctttccagttcttggttctcgttcctcccgaaacctggccagacatcttgccagagtttcacaagaaacccttgcatcctgtgttaaattccccatccacctcgtctgcttttcctcaccctcttacactggcttgagttagttcctgttgcatgtaatcaaagagtcttaacaaagacagattgatacctctctggtgtgtatttgattatagagatggccaagtaaacacatagatggatgttcatacttgccctttggtaccctagaaggtttgagttgggaacaaacctcagagatctcctagccttatcctcacattagacagatatggaaactgaagactatagacaggtaaaataagtgatttacccagggtcacacagctaggactcgatccctagccttctggtcctcaggccagccaatgttctttctaggctggctccctagtgccatccatccatccatccacccatccatccagtaaatataaactgagcaagattctgctacatgacaggtactggggtacatgttttttgtcctcaacaaactcacagtgtggaaggaccaaagttctttatgtttatttttacttcattccctggggtttcccatctggagggcactttactaactttgctagcccacgatcacagcgagttcatccaggagtctcccagaatatactcccatcatgtattctctgtgcctcttgggtctattctttcctaatatttgtgataatccatgttcatattgaatctcccctgggagatccttgaaaccagggactgtgtgtaagtcattgcttttacttcctagcacggaatctgtcacaagatacttctccaataaatgtctgcttttctagagaatttacttcactccttagaatctcaagtgagagctgtgtatcagttagctcctgctaggtaacaaaccacaacaaacatagtagcttccagcaacaatcatgtattattattctctctcctggttctgagagttgactgggatcagctagatgattcttgtgcagagtctctcatgtggttgcagtcagatggtggctgggtctagggtcatcttaaagactttgtcattcacatgtctggtgtctcgactgagaagacaaaaacagctggagtctggaacagctggggctgtttcacacacaagtgttgtttgcacaagagatgtccaagagcttctctttattctctccaagcactctccatgtggtggcctcagggtaactggtgactgaaggctcccagagggattgcctcaagtttttttaaacctgactctgaagtctctcacacagtgtcacttctgcaacattctgttctcagaggtcctgccacatgcaagaaagacacgatcacagaggtcctgccaggtgcaaggaaagggcacacagactccaccttctcatagaaggagcatcaaacaatttgcagatagttttctacatctctgcttgatatgtcttcctgcatgagaaatatgaaaaaatgaacacttttcagggagctttcatttcagctggaagccatgattttcagacaactgatagtttctggcttcactgacagctacatccattgcaactagtttgctagcccgagctgcagttactcacagaatttgctaactatggactttagtggcctaggagttagcatgggcaggcaaggtggatcagggccttgttttatcatgcaattcttgtgtgctgggaactggctaggctctatggttaataagaccgtgatgaaaagatgccttggggttcctcaatgtagtcatatatgagtggttctgtttttagttgtcaccatgatgagggtgtgcagttgacatttattgaataggggtttaggatgttaaacacgctaccatgtgctagcaatcctgctggaggaggaactttcctaccaaaaatgctaataatttctgacctaatgtcagaaacacagtgaagtggggaagctgtgagaagtgcactgtggagtcctcagcagatatgcatggtacatgtcaccaagggtggcatctggtttgtgtgccacactctccccaaaacaactgcacagcttctgcccttcctctcccctctgcagccttgctctccatcaaggcccaatgcaagcaccccctactctctcacaccttccctgatttctagagctggacaggttcaccccctcctgagcataaaacagccctttccttacctctttccttgttctgattattttcatatgtttcttttgtatcactgttttgcgaggccaaggagagatgggacaggtcccccctccatgtccgcacaagtatttaataagtatttgcttatttatcttctgtttcccctctcctgtctactcctcgcctcccctaaatgcctgcacattccagcaagaggacaggaagtctggggtttctccgcctctccactccacactgggtcttgcccactctgcctgataaaagtcagggaaccatctggcctctctgccaccacctcagtaaccttggccagcctgttttgatctcagcctccctttctccaccctatcttgtgaatgccttcaacactcagcatcttgaccacacacttggcttttgctctcactctgacttgtacttccaaattagatccctagaatagctctgctttccttccagatcttaaggggctcctgaaggacagaggccgcatcacctctttttaaaaaaattccaccgattgcaaggtgttacctcctttggaaacccttctctgacacctctggcctggaaaatgggttaagtttcccctttctagggttctttaccaccctgaacatacccagatcacactttatcatgattatctctttacctgcatgactgtgtagccaggatgagtgatctttgagtgcaggctcttaggtttttgtttatctatttataatagatagcaaaataaaaatagatccgttcatctcttcatctagcattttacacgtctatctttagcaagcctgtgatcagtttaaggagccacagcaaatgaaaaaggcatggtcccatcctcaaagttcacggccttgtgtgttgaattgatttttgtctcttgctacaaagaaaatagtagctccttcagtcttcatctccagatttctcagtgcttttctgttttcttgaaaagcagtagagcagataatttctaattgttgaggaatctggttcaaaatttcaaggcaaaaccgccccattcatgagagagaacattcaagtgacagggccttcaccattgcactgccctgctaacaggagaccttgagttgtggtcaagtcagcagattcttttaaattttgaaatacagatcttgcataatgaatggagaaagggagaaagaatggcttgtgtgcccttttgtgctccttgaagtttacattctgggaaaacatgaaactggagtgtcagccttggtggaactgagttggaatgctgactggcacacaaagggattctggtcctgtttaaccaagatgtgactttagaatactgagattgtatgactttatggatccccagaggaatagaaattcatgggccagaatgacaaacttttattttgaaagccacctaggctccacttagagccatcaaatgcttgagaatttattatgactgggcaagccactgcctaagagtcaggccagggtagtgaaaatacacacggactttgtctttgaatgacctgaatgtggcctagttcttcctagcacagggctctctaccagagctgaaagcacaactgttgcatttgcatgacatagaagcagccaaaagcttccacagtgaggatcatgtgtcgtgttgatgctgaggcatctcctgtgcatggtactgaaatcacagagatgacttatgatgtgttctgtttgtgttggcccaaagcccaaaccagaaatgtatttcaggcttggctttctagattctatctccagtcatgtaaaagttcattacgtggacccactcatcctgtcctgctatagttaaggtctgtcagcatttttcaaaggtttataattcaaccacaaaggagaatgcagtctttaggctgcaatgtgacctataaagcttaagccccggggtcagaaactttgcttttttgttgttgtttttaagttaggcccttactaagttatagtgaagcaaagtaatagctggtggttttgttattattatttggtttggttttacagggatgggaaaagcttcaagtgacttcttggaatgtagatgtaccctaaacctaaagagttgttaggactatagatttacttatcatcctagcattcagctaaagatgggggtttagtttttaaaaatttagcattttaaaattgggatggatgaggctgagaaagttagaaacaagattgggaatatttcaccaaaactcaaggaccaattctcaagccagaaactttgtattcaaaattctagttaaaagactttggtcatattatataaaaatcaagtcatttccctgatggttaagtttgtttctgctcataaattctaagtattcccacttagaaatttaagtgaaaagtgcacatatgataaatataaagtaacaaaatgataccttctcataataaaaacacttgaaaatttgaggtaaaatagatacaaaaatacactttctatgtctgttcagctgctataataaactaccatagactgggtggcttataaaacaacagaaacttatttcttacagttctggaggctggaagttcaagatcaggacaccagcatggtcaggttctccctgttgagggctcatttcctggttcacagacagctgtcttctcattgtgtcctcacatggtaggagaggcaggggatgtccctggggtctattttataaggggactaatcccattcgtgaaggtaccatcctcatgacctaatcacttcccaaggccccacctcttcaccctgagcattcaacatatacattttagggggccacaaacattcagaccatatatccacaaaagcttataatcagcaaaaggtctcttagagtaacctaatttgtggttactaaggatcccattaaataacctgctcctggggtaaaaataaagactggtaaaaatcatagcacctttggtgtgggaaggaggttttatctggatggtctcaagtcaattaatagtgggaaaagttcttaatgacagtatgttataaaatgcagattggcagtagggacaggagaagagtgtcaatggaactgagttccagtccaacctgtgtacagtctagctatgctaagacctctataaaccttggtatcttccttaaaatggggctggaaaatcctatgtatatatacagggttctggtgatgacaaaatgcaataatacatgtaaaatgcctgatagaatcagtgcctaatatatgtttttcccttcttctcccacctttattaattatacctgagacataaaacaatctaaatgctggagaccagccactctaatttggtagagatcttttcttaaaaggaaaaagtagtttccctgagcttttaagagtgcatttacatacaatttgtctatttgtaaaaaagacctattcattaaaataagcctctaagtagcaaagtgcaagttttcttaaactcctttgagtggcaccacatgctaactgggcttcctaaggaaagaactataaaggtggctgtctttccccattaaccctgatttatagggggttttgctctaagtgcatatttgcagaaccattcttaatgtgtgtgtgttctctccccaaaaaggaggcacattattggccatttgttgtctttggtccagtggatactctttaaacccactcttactactctgtagtcaatagcccaagctcagcttgatgcattagtccttgtgttttcaagaaaatgtgttcggccagcacccagcccagcacagcacttcttttcttttcacttttaaccatcatatcccctggtttccagcaggttcattcacccagaaaatgtttatcttcattgtgccacctcggtacttaacctggggcagaggtttggatactggggagtgcaagaggaagggttgggttggaggtgcggtttcactctttatcagttatgtgaccttaggcaacacacttaatgtctcagcattggtttcttcttgtaaacaagggattgtagtggagaatactcctgaggatttttgaggaataagttaattacagggtttaacaggaagccaggcaagaatcaggggtcaggaaatggtagtgatagttactgtagccaggtgttctcttattcactacacaggagaatcatttggagaagggcttttaaaaatgctcatgtctggattccatcctcgaacaattaaattagaatctctaagggtgggacccaggtatcagtatttttttctggaatacttttgatattccagagatggattaaatcctttaacccccacaacatccctaatgggtaggtatcattattagcccatttcacatttgaggaaactgaggcttagagaggttaaatcacagcaagtaaaaggtgatgctcagatatgaagccaagcagtctagctccagagcccatgctcttggttggtgtgacgcagtctattattataagcagtgcctccagtgagatgtccggtgagaactaagatccagcaggtggggtcatccgatggtttcggtcccttcataccttcaggttacccacctcctgcttttaccttcagctctgtgtgttcaggacttcccagcagccctgtatcagataatgaactgtggttattcagaagtcccccgctattttcggctgattttattaaactcagcttgtggcttgaactcaagaatgtgcaagctgatttagattatgctttgcattgagtttattaagataaaaaatatttcccgagatagtgagtcagaagtatttatggtgaagtgtgctgaaagtgaatgcaggttgatagcgtgaacagaatgttctctccaagtcaaatgcgatgacctaactgtgtttggcagccttcctttatgtttagctaagcatttcatttcatgttgggaacctcctccctcttctgaaaagcatcagtcatgtgggaggctaggattttggcatgtgcctcttttgataccaagacccaggccctaaacctaattgtgactggctcctcggctgactggctgggttgccatggcaatggactgctcaactctttatatctcagtttctctcacctgtcaaaatgggaatataacacttggccccaccttcctccctgaggagagatgggggcactttgaaaattaagtaataaatgttgggaaggatttgtggatttgtggatgtgacatcttgtcaagtgggtaaataataaatggggtgtctccaaagctaatttgcctaaaattcacttgagccttccatttacttcatcaaccagcgtttattaaatgcctatgaagttcacaataacacatgaagtgctgaggggaatacaaaaaatgtaaaaaggaggaaatagagtctcaattcccagagaggtcataaaataacttttttcttgcagtttgctttttctggttcattaagcctcagtacagaccatgcctgcactgtatttaaaaagctcattctcaatgatgacttccagttacgtcataagcaactagtggtgatttagttgttttcagtaccagtgggtattgtcacatgcttgatggactcataaaaaggcaagaatattttttagttcaggttatgagtggtgcaaaggacaatgaaagactacaggttggattgattgggaatctgattgcatcagaacataatatggtctctgctgttcaaaggcgtgggtttgggtcctggctctgccgctttctggctgtgtgactttgggaaattccttaacttctctgtgtctcagtttccttatctctaaaatgtggtcagttttagagtctacctcataggattgttgtcaagtttaaattaaagtgtgtaagatgctcagaatagtgcctggcattttgtaaatgctcagaaaaatgttagctatgatcatcactttccattgttaatgggagaagatggtggcactaaaaggatactggcatttcattttcctacattgtaaaggtaacaaatcctttttaattcagagtcctaaacttttgcccagatctgacacaatcgcttgggattgccccaaagccccaaactgcttgttcggaaatagaaaacatgccatccaagccactctgctctctgactcataccgttcagggcctgagctaacccattttgttctgaaagccttacaccagtctaggaccctgagggctgggaaagggcagctatggagtgtgatggaaacagcgctgggcttggtgtccaaatcctggctttgccttttattagctgtgaactctgggataggctgttaagtcctctgaactgcggtttacccatcctaattgtgcaaaagcaatggtgggtgaaactgctcaaacaaattcagacaatggcaccaacggtaccaaactagtggtcactgtacattccactgccatatacttgtagttgaaaagaaaaaaaaagccaattgcacttaagaatatcttccatggagcagtaaaaattattaattgtattaaatcttgacccttgaatacatagatttttaatatttcatatggcagatgggcagtatacgtaaagtactcctgccaagtactatgactgtctcaaagaaaagcatttgagttctgagctgaactagccacttttactttaaagaatgaccgacagaaaaattatggttagttattcttgaatattctttaaaatgaggaaaatgaacctgccgcttgaaggaaacagtagtattaattgccaataataaaatttgaactttccagaaaaagttagaattttgcgaaacttttagccaccatcacgagcttgacaacttcttcccaatcataactgatggcactggtggtgatattaatgcatttgaattttctatattagataagtaagggtgtccacattttgaaaacgaacgtaactcagtaaaccagtgttctctaaacaggcaatgcatgatgttacaaaatcgtatgtaggtagaataaccattcaaagtacaagataaatcaatccattataatttaatagattatgaaaagtttattgatatgatttcagatttcacattgcaaccaacgtttaagaaactaccacctatcgaattttggtgtagtatcaaagaagaatatcctaaattatctgaaagactattaaaaacccttcccttttccaactgtgcgaagccagattttcttcaactaaaacaacatacctcaacagattgaatgctgaaacaggaggcttcagctgtctggttttaagacaataatagatattcaataataaaaaaaaaatgccacttttctcactatttttggtatacgcgtgtggaaaatattattttactaaatattttattaaaatatttatgttaagcaatgggattgtttttatttttaaataggttaataaacaaatattttaaaactttctcccctcagtggcatcaatattttaaggattatctaggagtcctgagaccaaagaatttgagaacttctatcctacagcatggactctggagccaaaataatttgtttaaaatctcacttctacttactgtctgtgtgatcttggacaactttcttaccctctctgtgccttaccctctctgttttccatgtgtaaaatgttcataacaataactgtcatgatgataaataccatttaggtgttaggtattaccaccatcattatgaaatcattattgttgtcagtgtcatcatcatcattattactagtattagcactggaaggcatcatttgttcagggacacagagctagaggtggattcagtgggactggaacttttcccttaagccagactataccctacctcccacttaccatctgccatcttgacatttgcagtctagggaagaagggaaaaaaagatgagaaatcttccatagctcaagcacatatcatcagagctactgaatcaaaccattgaaaaaggtacaaacagccaggtttacacataaaagccagattgctttgtctggcattcaagctcactggacacctgctgcctgtcatccagttgttctgcagctgcccatatagaaacacaaactgtctcagaagaagcagacccaaccccaaaggcccagattatgaatccaaagcccagggaggtgaagtgatggtctgacacacatcgctagagagtggcagaactgctacttgagtctagtgtgaattccctctggactggacacctttgctgggatgcccaggtgttctcgttctgcttactaagtaagcagctacagatggccaacaaatttgaaacttcttcttcgtcagtgaaaagttaaaaccaaattccctgtttgtggcaaggctcctttgttcagtaaacacaaagatctatttacatttcttttgttctctctggaaacacactgcttgggtcatctactacactgatttcaaggtgccctgcaaccctcatgttgtttttagatagatattttatagagcagatcaggtgaggtgcctggcctctggagggaaaccagaaagaacatcagccagcacccatggctaaagcttaggcccattaaccagacagtcttggctgaagttaggggaagagcacaaccctgtgggtatatgtgtgtccacggcccaccttggtttagggagatattccaactctccatgggtctcatggtaccaaatctcagccctcaatgggtctcatggtaccaaagcagactggtggagtgaaaagatttgggcttggcagccagagagatgtaaattggacctcagttctgccacaaggcctccggcaagtcactaaaccactctgatcctaggtttcctcattgtaaaacagtgataatgacttctcccttgcaaagttagcatacaggtgaatactaaagtaaagccctagcatatagtaggatttcaaaatagtccattattggtccagaactggccagctgcctcaaatggactttctttaggtgcttggctgagcctgaggattaaaggccattagtgatggaagctttgggcagtttcctgagtaaccatggggcaagtctgctaatctctgagacatgacttcctcatctgcactggaaatcatagtaattaatgtgcctttcttacttctctagattgttagaggataacaggagacagaggctgtgaaaacattttgtcatgtgaaaagtggtatacagaagttattgttataaaaacaatagtaacaacattaattaacatttttgagtgcttactttttgccaaacactggttgaagtgcttcccagatgtcactcactttcattttaatcctcttctaacagttccctcagatggagccctgtttattattttggtttttccgttggttaaactgaggtacaaagaggttaagtaacttgcccaaagtcacacagataggcaaggggctgacctgaattcaaacccagccaatcaaattccagaacctgtccaatgcagtattaatcactatgcttatagtggcattgttatgtgattgctatctctaagtttctctccacaaagggtacatagttatctattctcaatgaatgatatggggctataaaggcatgataatggctccatagagccatctgctaattagtctccctcctttctgggcatacctcaaacatcttaggaacatatgtgcttatatccatgagcaaacacattcgtggattgagtatagatgtatatagattggagaaacatgcccaaagatagagatcaaaatataaatgttaggaagcaaagcattagcaagatcatttatgggctcatgaatctgttgtgaaggataattattcattggcttaagtgagatggaaagtgtcattatggtaatgcagtagtcatgcttaatctgtttcctactgcacatgtgataaatgccattcatatgtgagacacactcctgtgaggctgcccagacattaacaatgttccttctgaatttggggggacggaaattaaagcaaataatgaatcaattatttttagcatttatgaactcattttacagacatttgggcaattaaattacccggttaaatagctcagaaaaatgttacttttcaataaacttccattaaattcaacaaatttgtggcgttctacctgtgctgtccagtacagtagccactagccacatgtggctatttaaatttaaaaattcagttttcagttgctccagccatgtttcatgcattcagtaagccctgtgtgactagtggctatcaatcagacagtgcagattatagaacatttccatcattgcagaaagttctggtggataacactgctagacagtagtatacactgaggatgcagtgatgaccagaacattcccatccctgcccttatggggctgatagctctgctgaacaagttaccccagacttggacctacggaaggacataggacaatgagaaagtatggcaggggatctatccaagaaggggtgcttaggaaaaatgaaaccaaagaaagctccctacccatgaataacagagcacgtttttaaaagaaatcaaacttaattaaaaataaataaataattttatctgcaattggattctacaactaatattaatattgatgtttaaatacttgattgaagaataagcttaaataaaacttattttgttattaaaattcatagtgcaataaatcttaagaggagccaaagcaaaatatacatgcagcatgattccatttatatgaagttctgaaacaggcaaaattaacctatggtaatagaaattagaaccttagttgcttcaaggtggggtgggagggagtggttgggagcagggaccaactacaaaagattgtgggggtactttctgggttgttgatgttctatcaagatagggacatttgttacatgagtatatgcatttgcctgtactcatagaactgtataactaagatctgtatattgcacagtattgtatatgaattaatctatatatatgtgatcaaaataattacatattgtaacatgttatggttgatatcagtaatattatggaaatgtccattgctttattactctgtctgcctctgacctggccttcataaccttatattgtcagtaacatgaaagtttcaggcatcctttctgatcttgtgccatgtggatatgaatgtgttgctcctacttttccaatttttgatgctttctttcttatcaaaagtgagcaaactggaaggatgtttgccaggatgttaaaaatggtgttatttttgggtggggagatttgaggtgaactttattttctctcttttgctatgctggaatttggaacaaggagtgtatatgattttttgatctgaagcacaaaagcttatccatgtagtcttttggagactttgggttctatactctgattagtgacaaattttcttccaagcagcaggctctatgggtggttatttagcagtcctctggtcttaatcaatgtgattgtttctttccttgtctgtctcacctgcctctcctgctcagcctctctgtgatcccaagggtacactggaggggatttggctgcttggaagccctctcaagctgtctgcccctctcacctgcctcctctctgtgctcacagattcttacctgaccctcgatgaaccaatgaataacatcaccacgtctctgggccagacagcagaactgcactgcaaagtctctgggaatccacctcccaccatccgctggttcaaaaatgatgctcctgtggtccaggagccccggaggctctcctttcggtccaccatctatggctctcggctgcggattagaaacctcgacaccacagacacaggctacttccagtgcgtggcaacaaacggcaaggaggtggtttcttccactggagtcttgtttgtcaagtttggtaagcagacccctactggggatggactttggccctcagcccaatgtggtaggatggctagagtccacagggacaggaaggaaggaatgcacacttagtgagaatgtactctgtgcccacaaccctaaacctggtatggttgtacccattttacaaataagtaaactaaggcccagcagttagttaccatgttacccagctagtaaacagcagagcaggaatgaggtccggatctttctgacctcagagcccctaattgaaaccatcgtgccgttgagctcttttcaacaaggatgcttcttgtccaagaagttggaaatgttcgcagcgtgcatggcccttttcctgccatcaaggactagaaggaagccccactcactgttgcaatcaacaccttcatgcaaccactcagcccattggaaactccctgcatagtttgaagatgcttactcgattaactctttttttagcacttgtcttagcattttcaggccctgaattgtgagacatagacacgttctcactggtattttttttttttttcatagagatggttgggggaatagagcaaaacaataaattccagaaaaataaatactacctctgggtggttgagaactttaatttgtaatgatttgactgtatccatactcaccctccaataacctagactgactgtttcttttgtttttctttcatttcttcaggcccccctcccactgcaagtccaggatactcgtaagtacttttatctcctttcttgtcatttctaagtgtttctccgtggttttctagggcaaaagcaatgttgtcctcttcttaagccaaaatactggcttccagatgtcattccattttgccctgccctcattccattttgcttgttctctgctctaaagattcacaggagaccaccattggcagaattctcaagtgtagtaatgttgattctgaatgatcaaagcaaaaatcttccatttactgttttagaaggaatctaacatttagtggcaacaatggattgatttggtaaaatcaaacaaaaaatgatatagtgctggcataggaacctttactctcagggtctatgtttctgcaagcatttttgatgaattcattattgatcagggcaacaattaggtaatcactttattttttattccctttaaagaactcaaaagcagaagttctggctgggcgcggtggctcatgcctgtaatcccagcactttgggaggccgaggtgggtggatcacgaggtcaggagattgagaccatcctggctaacatggtgaaacccgtctctactaaaaatacaaaaaattagccgtgcgtcgtggtgggcgcctgtagtcccagctactcgggaggctgaggcaggagaatggcgtgaacccgggaggcggagcttgcagtgagcccagatggcgccactgcactccagcctgggcagcagagtgagactccgtctcaaaaataaaaaataaaataaaataaaataaaataaaataaaataaaataaaaaagctgaagttctaacttacactgggaaagaaagtcccaagcttggactgagagttgcatggaagtttgattcattttgagtccctcgttaatggagtctaaaggtccaatttctttcactaatgctattgttgatgcgtttgtcatttgttctggctaaaggattctcatctttcactttaagagtatctacttggggcatttttctttatctatatttttattttgggggaaggacccacttattaaaactcttactctacaaaaaaaaatcctcaatactctgtagacttttgaaataaaatttttgtggctctgccacaagagcatcaaaatgtttgatctagactacacctatggcaaatataacagccacttaatttgctccaatcccctctgtgccacttaattacagtgtggggtattttaatacatttgtgtgtgcctggaggcccagtggcccacaatcccattaatgaaataggtaatgggtaaaaataaacattggccttcagccacacagttctgctatttcatcagccagttaaaggcaactgtaaaagagtctttaaaatcactcaagtgctaattgcattctacttgcccaggtagaaaatgctgattgatcttaaaacaggtcagaaatttggtcactctgccttgcatttcttgatgctaatctgctttttttttttttttttcaatggtctcaccattggttatatgtggaatccttttgaagtcttagttaaacaaagatgaaaacttttgttacttgtaaaaatgtctcccaccctggtaccttatttgttcctgttaatctgtgtttcaaatgtggctgataatctatatcccaggctgattaatgtggttcactaatctgcctttactattaagtactgtgttgttgactttcagcctgttgtatttgcattagagttctttttattatcaaaattatgattatatccttctatgttcttcttgaagttttcattcttcactgctgtccttctgatgaacccagtctaggtctctcgtggtttttaattttatacaaagattttatacccctgttgtgaaccgatatctatggagagggtattgaagttccttaaagatgctcaaccacagctaaaaagtatcctttgatatcacgcatctctgttttatattagctgtcagattatctattacattagtcggtaatagcatgaaatgtatagttaccatgtttgcttgcagggagttacaataaaatacaattcaaattggaaatcccatggggccttttgcagttacatctccattctgtttttggcattcctagttggcattttggtaccttttttttttctttcccagtgatgcatcctgctctttatctcttctcttaattgccaccacttcccctgtctctaggagttcttcacttcctgagactaactcccagaaagaatgctggttcccatgcctagcttcggagtagccctcaataggcagccaaccttctctccaaggggacaggcagaagataacaaaatgatagccatggggaatatcataacattgaggtccctctaaaggttgtttgtcaaattgtacactactatttccaaaagaggaatgaaatacagttataaattgctctgtttatttgaaagtggcacagagttactgcaaaagaaataaaaggagcatctatgacccaactctaacattcagaacgtaaggactgtgaaatacattagacatatgaaacctggtgagagctgaggtccactgaggcaacagggctacacaactcctgcctgggaagggcttgtagggacccttgggactatggcccagaaaggcacttgtcacttcctctgagggactgcatcaggtttccacatgaagctttcagaatgatattttagtttacagtaggaacaagcttgatattttcgtttggtttccgttcatagatttaggcttcatttcttctgtcattgctgggtcctggctacccctaacacttataggacctggggcatgagtacaagcagaggttcacataccatatgtctaaatatttaaaagttataaatcaagctagcaacattgttgaataaaatatgttctatcttcccacagtgtcaaatatacctttttaacgttaaaattttaaaatacatagaaagttgtggtgtgttttaaatgattaagagccaggaactatgaaaaatggctattttaatcattgttatgcatgtctggatgttttgttcatgggccaaagatatcatatataattcatagattgttatatattagttccataaaaatttgtttgccttcctttcaggaaaatgactacctaagttgttttatgcaagatttttacagtgtatattctattgataacatcgctaaattagacaaatttgtttttctttttgttttattttattttattttattttgaaacaaggtctggctctatcacccaggctggagtgcagtggtgtatgatcttgggtcactgcaacctctgcctactgggctcaagccatcctctcacctcagccttctgagtacctgggaccacaggcacgcactaccgtgcctggcaaatttttgtatgttttacagagatggggtttctccatgttggccgggctggtctcgaactcctggcctcaagcaacccacctaccttggcctcccaaagtgctgggattgcaggcttgaagtactgcacctggcctgaacaaatttcttaagtccttgtcattcttgcttttttttttggacaggttctggctctgtcatccaggctggagttcagtggcatgaccttggctcactgcaacccctgcctctgcattcaagcaatcctcccacctcagcctcccgagtagctgggactacaggtgccagccaacatgcctggttgtaattcttacactgtaaaactaattttaatttggagaaacttcactccctggagccagtggcagctatagttatcaataaaattcctaaagtgatacttaaatttggaaatgaactaagaattatacatgccatgttcaaacacagaaatggaatcatatatgacaaataatcattattgtagaatatattacaaaatattacaatttaatcatataaatcagtatcatacttcatacattatcctaggtttgtacaaatttaagaataatatgacttgtttaatgtgttaattttcttgggctgctggaaagtatcacaaactgcatggcaaaaacaatagaaatttagtatctcatagttctggaggctagaagtatgagatcaatgtgttcatggggttggttctttcttatggctatgaggaaagatttctcctttccagaagtgtgtcagaatttttccgtattcattggcttatagatgcatctccccaacctctgccttggtgttcacatgatagtcttcctatatgtgtagcccttaatttccccttttcataaggacaccagtcatactgtattgggatccaccgtgacgacctcattttaacttgattacctctgtaaagacctatttccaaataagatcacattccaaggtacctggaaattaggacttcaagatacatatttgggaggacatggttcaacccataacacttgatattgcaaagtttttctcagccatgcaaaactcttgcaaatgttattctaatgtgtgagagctttcagaagcgctggttggaatataatgaaaatagatgtttggtaatattgggaatgatagtttgttgtgcaagaatattttgcattcaaactgagagaagaatttgacacattggttaatttatcttttctcctgctgaagtggctctgccagtgtagtttctcctaggctctaagaagagtccatctcctccactggcagtgtcacaatacacaaaactttgacagtatgcagttgtggtcaccttctattccaaggacagagggcaagacatgtagagaaatgttccctgggccagaacagtgctggtcacaaaaatagatgtctaaggttttgattacattgtgcgagcactcattgccagatcccaagaggcaaagggttccatgcgtactctttactctcattacatatattccctgtgtattttttgtatgtaggcccagggccaggacctttctctctttttttaataacagttttattaagatacagttaaccataaaattcactgttttaaagtgtgcgactcagtctttttactatattcacaaaattttgcaactctcactactatcttattttagaacattttcatcatctcaaaaagaaacttctcccagctatagtagcttctaatttacttcctatccctatgaatttgcctattctagacatttcatataagtagaatccgacaatatttgtccttttgtgtttgccttctttcacttagcataaggatgttgaggttcatataaattatagcatgcatcggtgcttcatcctttttatggctgaataacagtccatgcatggctataccacatttcgtttatccatttttctgttgatggacatttgggttgcttctactttttgcttattctgaataatgctgccatgaccattcatgtgcattgtggggtatgtgttttcaattctcttgggtatatacctagaaatagaattcctgggttatatggtaattctatgtttaactttttgaggaactgcaaaactgttttccaaagaggctgcagcattttgtatttgcagaaggatagtatatgggttccaatttctccacatgctctccaacacttattttccttatttaaaaattatttatttatttatttatttaaaatttattatagccagccgggcgcagtggttcatgcctgtaattgcagcactttgggaggccaaggcgggtggatcacctgagatctggagtttgagaccagcctggccaacatggtgaaaccccgtatctactaaaaatacaaaaaattagccaggtgtggtggcgagcatctgtaatcccagctactcgagaggctgaggcaggagaatcacttgaacccaggaggcagaggttgcaatgagctgagatcatgccattgcagtccagcctggccagcagagcaagactctatctccaaaaaaaaaaaaaacaaacattattatagccatcctcgtgagtgtgaaatggtatctcattgtggttttgatttgcattttcctaatgactcatgatgttgagcatcttttcatgtgcatattggccatttatgttttctttggggaaatgtttgttcaaactttttacccattttttaaattgaattaattgtctttttattcttgaggtgtaagagttacttattttgggtatatacccttattagatatatgatttgcaaatattttcattctatggattgtcttttcattttcttgatagtgttctttgaaacacaaaagtttttcattttgatgacattcaatttattacccattctttggttggttgtgattttgaaaaccatcgcctgatgcaagcgtacaaagatttactcctctgtttttttcctaaaagtttttatttacagttttagctcttacatttaggtttttggtccatcttgaattaatttttgtatacagtgtgtgaggtgggagtccaggttcattcttttgcatgtggatatcctgttgttccaatatcatttgatgaaaagaccattctttacccattgaattgtcttggcactctgttaaaccaattaaacatgtgtctatgtgtctatccctattcagttctacatagtcttgattactataggtttgtagtaagttttgaaatcaggaaatatgagtactctgtattagtattccactggagaaacaaaaccagtaaaattgtgtatgtatacatatataaagagatatattacaaagaatttgctaaaatccttagggcagggagccaggaggcacaggctgggaacttttgggcagttgctcatgccatagtccacaggtagaatttcttcttcctcagagatacctcttaaggcctttcatctgattggatcaggcccacccaaactattgaggatgacctcctacaaccagtcagttgattgtagatgttaataaaatttataaagtactttcacagcaacacctagactagtgtttgaataactcaggactgtaccttgccagttgatatgtaaaactagtcatcacctctttctatattgttctttttcaagacttttgttgttgttgttattctgagtgctttgcatttccatatgaattttagggtcagcttattaatttatgccaccaaaaagtcagctggaatattgataaggatggcattaaatctgtagattaatttggggagtactgctgtctcaacagtattaagtcatctaatccatgaacatgggatgtctttccatttatttaacttctctaaatgatgttttgtagattttggtgtgcaagtcttgctctcttttcttaagtttattcttaagtatttgattatctttcatgctattggaaatggaattttttcttaatatcatctcagtttattcattgctactacatagagatacaattaatttttgtatattgatcttatatcctatacccttgctaacttgcttcttagctctagcagtttttttgtgaattctttaggattttctatctacaagcttgtgtcatctgcaaaaagagattgttttacttttttcttttcaatttgggtgccatttacttatttttcttgctttattgccctggctagaaccctcagtacaatgttgaatagaagtggtgagagtggacatcctgttttttttttaccttatctttagtgaaaagatttcagtctttcaccattgaatatgatgttagctgcgtttttccatagatgccacttattagattgagaaaattccctattattcctattttcttctatgttttttactatgaaaagctattggattttctcaagtgctctttgtgtgtccatttagatgatcgtggtgggtttttttttgtcctttattatattaatgtgatatatcacattaattgatttttgcatgttaaaccaagcttgtattagaataattcctacttggccatggtatataatttcttcttatcttttgctggattcagcttgctggtattttgttgaggatttttgagtccatgtttataaaatatattggtctgtgctttgcatttcttgtgatagctttgtctagttctgatataagggtaatattggcctcagaatatattgggaagtattcctttttcttccattttttaagaagagtttgtaaaggatttttatttaaatgtttggtataatcaccagaaaagtaatctgggcctgaattttcatcatgggaagttttaaaattactaattcaactttcttacttgttataggtctatttaaattttctgtttcttcttgagtcagttttggtagtttatgtctttctagaaatttttccatttcattgagattatctaagttattttattcctttatcattcttttaatttctgtaacatcattaatgatagtcccttttttattcctaattttaataatttgtgtctttttttttcctttgtcagactagctagtctaactaaagatttgccaattttgttggcaaagaactaactttcgttgaaaactggatattgaaatagagtattgtgacaactgtggaaatcagattgcctctcctctgatgttgctgtgtgttgtttttgccgtttgtttggtgaatttcctgaattaattctgtatagtctgtattttctgtcatgtactccctttaaagagagaagtctcagccaggtgcggtggctcatgcctataatcccagcactttgggaagccagggcagctggatcatgaagtcaggagttcgaggccagcctgaccaacatggtgaaaccctgtctctactaaaaatacaaaaattagccaggcatggtggcatgcgcctgtaatcccagctactcaggaggctgaggcaggagaatatcttgaacctgggagccagaggttgcagtgaaccgagatcattccactacattccagcctgggtgacacagcgagactccatcttaaaaaaaaaaaaaaaaaagagatgtctctactcagttagcctagtaactagttaatgattggacagaaatttccttaaaccagtaagtctcctaccctttgccaagaggtttaaggaaacctctgtccagtcattaactgatcactaggttaactgaggaggtccaaattcatcctgcctcctctagtgactgctggggtgctagttttcacggttaccacagaacttgagagaggaaaatgagaacggcaaattaaaatgccataaaattccattcttaacaagcgttagttttttttttcctatatatccactccctcacctatcttatgacatatgagaaatcctaacatgggacttggtgtataattagcattgaatgaatttaagttttctttctttctttcttttcttttatcttctgtggtctcctgcagaatcagtctataaaaagggcatggtaaaaaaaaatctatctcatagcattgttgaaaagattaaatgacataataagatgatgcatatatagtagctagcactgtacctgatgcatattaggagcttgataatattactaacagtatcatcatcaatgctatctgagcaaagaggctgttccttctttccagccagagttcttctgttggataatatttccagctgtgaaccccaaccagagaccttgaagcctttatttccttttctctcattggcctttggctgaagtctcctttctgcagagaacaaagtgaccagcttttgatgaactattttcctcttttatccatttccaagtgttagccatagtgaagaagtgtagctgggtgctagcccaactcaagaagtgataatgtaatatccaacccaagataaactcaaggataactttcaacacggctactcaagcagttcaggggggaggcatcttgtagagaggagaccaggaagtcacttggcagctgggccagcacacagagggccattgctccagtaaagcagctaacctccatctcttcatcaaaccatcctagactcagcactctgcagagaaggagcagatggagggaatgtgtggagagattagataagaaggatttctaatctagtgggggagcgagtaaaatgtacagaagtttgagaagccaagctcttatgtaccaatccacccccatcactcaacaatccccactgtatgaataaagcctggaaagtttccaattaaaacagtgcttgtgaatattggcaaggggtatctttgtgtgcagggtacatttaaagggagaagggtgaagatacacccttgccttctaggagtacactttctgagagcttgttcaccaggctgtgagtttctcagtctatctgtttctcagtctgttagtaatgaatgtatctcccacttagcacagcagctagcacatagtagatgcctaacaaatgtgtgttaaattgaatgttggaagtctgtgtcctgaaagcttttcttcacatattacaaggctttttatttgttcaacacatttttaccaagtttttttctgtgttccaggtcttttgattagctgtttttaagtcacagaaatgggtgtcgggaacaaaaccagtcaaaagtcctcattctacatcatttacactttcccttcctatatttataagttttaatatcagcttctacaataggttccagaacaagtggtgctcaaggaatggagaaaatgactattccaaccctagctgtaggtgaaccaaaaaccccagagaaatcaaagtgtagtttaaagcagtgcttctcaagttgtaatgtgcatatagatcacctggggttgttattaaaatgcaaattctaaaagagcaggtctgggagtgggcctgggactgcatttcttacactttcccagggggtgctggtgctgctggttcacacacttagagaagcaggggtttagagaagaggtgcctggccagatgctagttctttctgtgtaatttgctagttcactagccagtgaccctgggcaaattgcttactttctctgggtcccaagtttctttatttgcaaagtgaagcacttgggcttaatgtcttttatgattttttttctatctacatttgatgactaactgaaactcaacatttcctctgttatagtaagatcttttcattgctgtgaatttcatgcaacttgctcctagattctctttctgtaccctgaggtgttaatcaccctcttttatctgtcaggcgcttctatcctgtgcattctaaacaagatcttatctagttactttcaaacagtgtgaaagatttttacagggaactctcacctggaaactctccctcaaattctgaagtggctgtgatattgtgcgctcctgggtgcagaggaagttactgctccttttgctggtcagtagcagactctacttgcctcctgttgaatagaacagaattttcttgccatatttcttcactaggctcctgctatgttgggtgactgcctgtgttttgaattgaatgaaaggattgtagcaggaggcagtgcagtggtggattcagcctcttaatgtcttcatgtgggtgttttttgttgtttttgttgttattgttgttgttgttgttttagatggagtcttgctctgttgcccaggctgtagtgcagtggcacaatcttggctcactgcaagctccacctcccgggttcatgccattctcctgcctcagcctcccgggtagctgggactacaggcgcccgccaccatgcctggctaattttttgtatttttagtagagatggggtttcaccgtgttagccaggatggtctcgaactcctgacctcgtaatctgcccacctcgacctcccaaagtgctgggattacaggcatgagccactgtgcccggcccatgtgggtgtttttaaagcactgacctttttgcctgactggtaggcccagaaggctgataagaaaaacaagatttctggctttgcatgtgtgacttgtgaatgcaggtccattattgattcatcacgtcttgtacactcatagagctttttgagggaaacaactgaacctcacaacaaacatagctaatgaaatgttatgaataatcttgatgatgttaaagggtggctaagcataatgatcagttcttcacataaatattgtatgtaattagccttcgactttgtagggtaggaaagacactcccctaccctcttaggttctgtggctggagcctatgaaatgaattttgaaaagacagattaacaaaagaaaaaacatacacattttatttgatgttaatatttttacatgacacagggggtttcttagaaagaagtgaaaccccaaagatatggttagacccaggggctcatataccattgtaaccaagaatgataaattgtggagacatgatcaggcaaaggaaaaagaggtttgggatagggtggtaaattgtgggaaagtgactagaaaatgcatggaggaaactaatggaaaaaaagtgttatgttagcaaggtttgtttgtacagattcctctcatcgtcaactcattatcttctgtggtatgaatgttttcttcttcgtggtttagggaggagatctttctcacaggaaatgtatgccctgacttttgatagaaaggaggaagacagcccttcctaaatcttttgtttctcagttgccttcagcccaaaatagtgaatatgccagtgaatcataatgtgggatggcatatcctaatcccctccaacttcttcagtggaatgtgcaggtttcttccttctttgttaagcctctggcttttttcagtgtcagtgttgacaattttatctaattgctctcctcttttttaaaaaattatttttaaaaattaaagatcatctgttgctgtcctctctatgtctctttctctgtctctctctctctctcccatacacacacaaacacactcattcacacagtcacacatgctccagaagcaacaacagctgggttctcattatctagggcagtgcttctcaactccatctccaccttagactcacccagggagctttataaattacctgtacctgggctacaccctagataagttaaatcagaatctctcagagtggtacccagtcatgatattttatcaaatcaccccaagtgatgtcatgtccatgcaaccagataggaccctctcccatcccccttctcacctgaaaggaacttgcattagcccagctctacctttctctctctctctctgccccagcaccatattgtagacaccaaaggagttgcagcagcagaaactgtgcctggatggcaacatgcctacagcatcatcaggatccaatcaggaaagcagaacaaattctggactatttaacacagagaatttaacatagggaattggttacacaggtgatgaagtttgccaaaaaagcaaacaagaaattgtgatgcagcatcagcaacagacagaagccccagctacacttaggttggagggaaaaatagaaggggtaatattaccagagcctaggtttggggtcatctttggaggctggaatggtggcatgtctgttctgtgggcactggagtcatgagaagatgcttccactgctggggttatcacccaaagcaaaaagaaatgggagaaacaacttggctgctgtcttccttcacactttcaaatgccagccagtttctcccattaggggaatgctgcaagaaactatatgacacagggagcctgagaatcacagcctgcagaggtcatctgccttgcagatgctgacccaagcaggaaacgggcaaggaacggatctgaagacaaataggtgcagcaacagcactcataccccagattgatttccatgccactagaaagccgagcctgcagacagccttgaagaaacaggctggggagaagacaaagcattcaaagctgcaattcctgcccaaccttcaggtagaacattcagtggacagtttggattgtggaactgaggcctggagcaaaggtcaaggctgagggggcagacatggtggtacatttggctaagttggtggacaaactttgaagggagtaaaactccccaagagaaactaaaaaggaacaagaataagcagacctcttttatttatagtactgtctgtaattttcagaatattttttcttttctcctttgatcttagagccatctaatagctttgactagataccctggtatttttgttttctatctagaaaaataaaaaattgataaatcatcatacccttgccctttatcataacaagcactttttaattgtgtagaggggtgctctgatctagacctcaatatttatgaacttttgaaggctgaaaatggagacagtaaacttctagatatttgcttcctgggcctccaaagacagaatttgctaactgtggcaaacacttactaagtgctactctgtgccaggcctttttataaaactttgcacaaaaactaatagactattacttccccatttactcacacaaggagactcagcaaaggatgaagctttgatttgagcccatgcaggtggactccagagctcagactttggccagtctgctataccagctgtccttattgtggggagatgatcagttgatgaactcttacctgaattacaaatttagtcaccttaagtgtttgattgctgaaaggactcacaacactcaaatggtttatcctcatggggtagttttattacagacaagggaaacagtacagcaacagcagaagacagataggtaatgcaggggtcccagagatatcagatacaggcttctttatcctcctaaaactgggttgcacagggcactctatctccaggtcttgaaggtttactggcatacatgtgcagaacctcagttccaagaagtccagtagtggaggtcacttatagtgagctgatcacatgggcacattccagctgtgtgacatacacttcagtgattgaagccccaggactccactgaaaccaggtgcaaatcataccatccagttattattactaaataatgctaactgactcatacatcctaccccaaacaacttgaagactcatagtttcagagcatcatttatctttagtaaatacatttcatagtgattgccgatagttagtggttctgaagattagtctggggtcaattcaggccagctgggatcaccctgtgcctttcaacccgcttggccttgcttagtatgtaagtcaggaacccactcctagaacttgaacaatggtaaagtcatccaggtataaatacttgccactgggatgggacgtgttccatagataacagaaaagttatcatggttcagtcattacaaatgtctattacttcagtggatggcctggtatttttgtggccagcttctgatgtccttgtcttctactcattattctaagactgctgggtagctgtcctatgtgcttacatgaaaccccaactttctctcaaggccgttaaaatataacatgatgagtgctgtgatacttatctgtgtctctagagcagcaatgctgtccactagaaacatcatacagggcacatatgtaattttaaactcactttttttttttttttttgatatggaatctccctctgtcgccctggctggagtgcagtggcgccatcttggctcactgcaagctccacctcccaagttcacgccattctcctgcctcagcctcccaagtagctgggactacaggcgcccaccaccatgcctgactaattttttgtatttttagtagagacggggtttcaccgtgttagccgggatggtctcgatctgacctcgtgatccacctacctcggcctcccaaagtgctgggattacaggcgagagccaccacgcccagcctaaactcacttttaagccacattttttaaaggctagtcaaatgaagcagtgagagtggagaaggaacaaagaaatttgcaattgcttgtgatcaatcagttgtaaacacgatggcacttggactagccttaagatacattttaaaaagttaaaagaaacataaaattaattttaatatatattttatttaacccaacatatccaaaatattatttcaacatgaaatcaatataaaattattacccgctttattcagatataattgacaagtaacaattatatataattcaggtatacaatgtagtattttgatatacatgtacattgtataataattattataatggaatatctcatatttttttttctaagtcttcaaactccagtgtgtacctgtagtttatatttacaggacatcttaattcagatgctaaattttcatggaaatacttgaggccaggcgcagtggctcacgcctgttatcccagcactttgggagactgaggtgggtggatcacttgagcccaggagttggagaccagcctgggcaatgtggcgaaacctagtctctaataaaaatacaaaaattagcctggcatggtggcacatgcccgtagtcccagctatttgggaggctgatgtgggaggatcatgagcccaggaggcagaggttcagtgagccaaaattgcactactgtactccagcctgggcaacagagggagaccctgtctcacaaaaaaataaaataaaataaaaaggaggcctgtcgcggtggctcacacctgtaatcccagcactccagcctgggcgacagagcgagcctccgtctcaaaaaaaaaaaaaaaaaaaaaaaagccatacttgatctgtacttatattttataaaatgaataattaaaaacataggttcacattcccaagttatttcaaatatactcaattttctagtaactgaatcaaataccaaaacattatttttctttcatttttgcatccacattgacaaaattggttcatcatttttagaataattgaattgactttgaaccacaatgtatcatttttcaaactatttctatccaagttaaataaattcttttttttttttttttttttgagacggagtctcgctctgtcaccgaggctagagtgcagtggtgtgacctcggctcactgcaagctccgcctcccgggttcaaaccattctcctgcctcagcctcctgagtagctgggactacaggcgcctgccaccgcgcccgggtaattttttgtatttttagtagagacggggtttcactgtgttagccaggatggtctcgatctcctgacctcgtgacctgcccaccttggcctcccaaagtgattcactatatcttgtatcaactcagtattatttatatcaaattcaaagggatattgcataaattgaaaagcaacactgaatttatcaatgtcaacaaaacatttaaatttttcttgcagtttatgcaggcaatttacaaaatgctgtcaattacaattaaaatcttcagcatattgatccgtgttaaatgtctaaaaacgtcatgattgtttatttgtattgtgaaaagcctcagttccaacatacattcttatatctgtctagctaggttacaataagcttttccttttcctggagctgcatattaagtttgttcatatgcaacatagtatcagtgcaaaaatgtaaatcatattgccatttttttttactttgattattatttggcaaccatccttccatttcaagaaagtcttgaggtggagttagcagtgcagtaaatctttgtaaaactattctacagtcaatcagcaagcactggcaaagaatataagatcattaaatccattgcctttgatttttttcaacatctctgcaaactgtcaatgattctatttgcacatatatatgaaatgattttaacgactgtatccatgataccttaatttataaagtctgtctcagaaaactgagcacatatattttcagtttgtatcacaaagtacaacaaagcaataagggaaccatcagtattgttttacaattccactaagtctagttttttgacctaatggctagagtaccatccattgtgatagaaatttttttttcatacctaactgaaattctttgacagatgtaggagattataaagtactccacaagttccgttttacaggctgcaaattgacatttctttgtgaatttggaagtcctttaaagtaaacatacccaaaatatatcttttcaagtttctcttgtatgtcatgcctcatcaaaaactgaagaaaagtttctgcaatttttcaaaattttaatcaattgattttatttttatattctataagctaaataatagctaaaataattatttcttttaccatctctgtatctgaaagtggttttatagctgtacaaagttgcaagcacagattctgttaaaattgtgtagacttttttttgtaggacatttatttaattctaatttcaggtgaccaatttcatcaattttttttaactggtggcggggggaactttaaaaaaaaaatcaaaatcactgtgtatttgctgaaaagggtctctttattattgtccactttattatctttaaagttctttttgcacaacaaacttttttgtgatgatccattatgaaatttgtggcatatcttcttcccgtctcttttttccattacttttttgtttcggagagactttccttgcctcaaacactacagaactcgtaacttctccacaatagtacatgtttgaatcaattttctgtttagggctaaaaatagaaattcagaaaacaggagcagcagtctgataggatttcaaagcagcattcagcagactacatttcctcttgggttaaatgtgtgtgtgtgtgtgtgtgtgtacacgtgttcatgtgtgtgattgggtgatcatcgtgattaaagagaaagggtaaattgcaaaaagaaacaccacgaagttgcaaagtaaaatgttattcttttagattagggttaattttgaaacagcccaccactctagcaggcagatccctgcagaggttcatgacaatgggagaaggcagccagcgctgcagaggagccagggaggccacaactcctggcccagtctccaagtaggtgtgggtacctggctttcctgggaaatctccctttatttttattattattattgtggtaaactatacatgacataaaatatacaattttagccgttttaaagtgcacagttcagtggcacttagtacattcacagtgtggtatgatccttaccactgtctagttgtagaacatttttattactccaaaaattcctcctgtacccattaagtggtcactccccatcttttcccactcccagcccctagcaaccactaatctactttctgtctctacggttttgtctactctggacatttcatataggcaaatgatcctgcctatgtccaggatccaaatgacaattcatataaatggaatcatacacagtatgtggccttttgtgtttggcttctttcacttagcataatgtgttcaaggttcatccatgttgtgacctgtgtcttccttgtgttttgatgaccttgagagacttcctggcatagcaatgaggcctggcattgaagccatgcatacctggatttgaatcttgtcccacctttaagcttcagttttttgttttgttttttgagagagggtctcattctgtcacctaggctggagtgcagtggtgcaatcatggcttactgcagcctgaccctcctgggctcaagtaattgtcccaagtagctaggtctacaggcgtgcaccaccacacccagttaaaatttttttttattttttatagagatgggatcccaccatattgcccaggctggtctcgaattccttgcctcaaaccatcctcgcacctcagcctcccaaagtgctgggattataggtgtgagccaccacacctggcctatgctttagttttttcatctgcaaaatggaaatgatattcatctcaggaatccttgtgggggttcatttgctcattcaaaaaatagtgatggagcagccactgtgtgccaggccaaggcttcacggatatagtggtgaacaataccaggcaaactctttgtgctcatagaacttggttctatcaggagaaatggacgataaacatggagaccaataaataagataggaagaagaaagtctaatgtgtcagagagtaatgtctgggggtaggaaatgggcaactttaacagcttggtgagtaaaggttttctgccaaggggctgacatttgagctgacctctgaggaacagagtgagccaggcttgcagagagcaagggaaagaaagattattctaggcaaaataacagcaagaacaaagaccatgacatggaaaatggttttgtcacgatcatggaacagaaagaaggccagcgtggccaaattggatgagcgagttgtgggaagtatgacttcaggttagaaaggcgagcaggagctacgcgttacttagctgtgcaagccagtgtttgggcttcattccaagagccatggaagccatgggagggtttcagctaaagaggtgatgtgtcctcatttacaatgggaagagcactctggcatctgtgcggagggtggacgagagtatgagcaggagctggaagagcaataaggaagtttttgcactagtctagatgtgaaaataggtggtttgatgacttggaccaggtcggggtaggtgagttgtaaagaagtaagaggatttgagatggcttgaagaggaggcaggtgtgaaggtttaaattatataaataaacaggataaatggaatctgcatccaaaatgcctaactgcttagaacagaggcggtgatcaactcatgtcccgttctggtccactcccccccgccccaccacccacacagacacacacacacacacagacacacacacacacacaaaccttggtggcttttgaagaagtatttatgggtttcatcctcatctggattttcccatcatcaggaatgagtggcaactgcggggagaaggatgtggatgtgtctctgattttcacagcatgaagacagaataagtctaccattttctattcctctataatcttggtctcttagaatagctatagccttcagcaatgatggagaagcagggttctgtgggatgaagcaattagccatgttctaggagagagggaagagccaataaggagggtgttctctcctctctctcagttgccagagctcagcctgaaagggattcccttcctctgctctcccgccaccgtggtgcttccctatgttacactatgttgtggtccatggtttagttctccaaacaggagaactacccctggcacaaagagggccttgattaatatctaaacactgaatgagcaacggaaaacaccagtgcttcttgtcttagagccgagaaacttctgaggttgcagaataacctgtgaagttttttcttttataaagataggaataacaatagcatctatgcaaagaattgcaaggatcatgagagataatttgtgtcattcactttgcatgatgcctggcatatgacaagtccttgatagaagtttgctattactaagggcctgcttcctatggcttctttaagagctgctgtgtgtaaatggccctcagagcctctttgagggctctggactaagaggaaagaagaactctggtgcagggacccaaataagctctatcagttctcactgcagtaggggcttgacggtggaattaacaaagtgccttaggtttactgccagttccctgacagcctgatttcccatgtattgtgtaccagatgagacataagggattgtgaaggcaaatgaaaagcaggatattgtttactggggccaatataaatatgtttgtggggagaggagaacaaagacctcaaagcctgttgttgacagaaaccacgctagtgtttaatacatgacgtcatcctagtaaaaataatagttcccacaggtctgccagggaatgggagagccggggttatctgtacccacacatgccaggaacctcaggggtgctggcaactggtatatgatcctgacccagcttccaactagctccatggcatgtctgagggaggggcttcgtggatagtatcctactctgagttccaaacacacagatcccaacgtctggattccacctctgctagacaccagcttgtagcagagaccttagctgggagcctggtttttcccaaatgtaaattcagataagaattcaacccctactagagtagttgtgatgaaaaaacaagataaataaaataaacaagatttaaaggaaatgctaactgcaagagagcctttggtattcatggtagcctcacccacttctgtgtgctcctctctcacctatgcagaagcattgaaattccaggcttcatctccagtctcaccaccctgaacccctactttgcttagcttccctcctctatgtaaatttgttttatttatttaggccttttgtaaggtgtgtgaaggtatctgggctaagagagtggaaggtcagtgaacccctgagaaaatactagccacttgggggtcctcattcttgcccaatcagtccgaagatccaactactcctctgtgtgccccttcctgctccatgtgctcctttattttacccatttttctccatggtaaatgcaagtgtaaggctttgaaggcacaggggagcctctacaagccctgagtggaaattcgcagccagtatgtgaaagcatgacttcaattttatgaagactgggccctaagaactggacatgatgaagcttaccagtttgccaatcttcaccttctgttttcttcccctgagagtttccactagaaattccccagctttggtttgagtgcttggctctgtaatcttggagacactctgcatacaccccacaattaagacatcgcaactccatgcaatgtttcttcagagaaagttagatgcaattagatcatttgaagatggattagcctgccatctgcacaatattaagaaaaatcatgttggcaaatgatggggcctctttgaagagctctgaaggaaagccactaatgggctctacactgggtttcccccctgttcccgaagggttaacacaatgtgtgggaaaggaaaaaaaaatcccctgtggcattaaaatgctgtgtcagagatttgtaagctcccctttgtagctctgccctggggcctggctcacttcagtggagatgaggttaataagacctctgttgctgcttggcagttcttaacggggttacagtctggtgcctgaccagtgaaggacagttattattaaagtgctgaggaatttaattcaataaggtcagggacatctgctgtgcttgcttgcccaatgtccatttcttcttctttttacaagaactgcttgcttttcctttgcggaaaaccacctcatgcccattctgtctaggtggagctgacccttacctaaatcagggtggccacatgaccaagccagcctagttagtgtatttgggtatccaaccgtgccccaaagtcactggacttgtcagttacataagcctataaacacctttacccctcaaccctcatttttctttttcagcttctgcaaggtggagtagctacattaactatttaagggattaaatggcatgaagtataattagatagaaactaaactctgtgggaagtcaagagagggagaggttgatgtgggtgggtgggcttcctggcagaggctgaacttgaactggtcttaaaggatggagaggattaggtgagaccaagagaatgcagaactctgtgcaaggcacagagggagggagaactcagttaaaatgaagatctgtggacaagaaatgaaaagtgggttttgacaaatagaggcagggaaaatgccagaggacttggaatcccaggatgagaagtttgaacttacctggatagttccccagtgtggacttatgtatgggtggggaaaatccacaccagattgtgctaccagtttgggcaagtatatgactctatgccttacctgtgttagagactggcacaggtgcaggcagggcactaaccttggctccgccacttaataaccgagcaacaatgggggagttacttaacctccaaatctcaatttttttccatctgcacaatgaagataaataataacctgacattcagtgtttgtgaggataaaatgagataacctacgtgggagcccttaggatagtacctggcacatgataataatagtagataatatctgttgagtgcttattagtgttcccgaggcactgtgctaagctcctgacataccttatctcatttaatcctcccaatagccagtgctttaaaaatgttggctgaatccgatttggggtaaccttgtcattcctgtgcttgatcaaacaataagcttatcagacatttactgtccaatgagagctgaatacataatctgaatattcaagttctaatttcttaatacacaccctaaaatgttttaaatttaataaaattacacttcagaacatctagagaatagagtaaaaaaaatgtacatataacttcactaaccacaacagaaccatgtttttctaatatagagggggttaagattatctgcttttaggcccaccagatcaccacagtgtgatctggggcaagttactttatcttctctcagccttagtttcctcatctgtccttatacgatgtttctagaagcttcttcataggggttttttgttttgtttttggcaaggtttaagagtgataattcatgctgtatggagcatctgacacataatacaccatcaatgttagctcctatgaatgcctccagtcactgtcctatacattttccctgtgattgcaataaccgtgtatatgcagttgcatccttattttttcacttaacactgtatctcaggcatctttataagtaacaagatctccctgtccctcattcctaatgtatatgttctcctaaagtcactttaagtgtatcaacttgcccttgcttcatcttttaaaaacatgtataagtaatgctgcactccacacctttacgcttaatggctctaagagttcacgtttcagtgcaccatctctttgagttcaaattatggttctgcccacaccttttcagaatgtggtgagaatgaatgacacccaagtcaggaaaggcctttgacaaattgcagattatgctggcttgataagtgaccacaggaaagtatgattgtcacttttccagcagtgggtttcctccagtgtgatattctgtgcctcacctatcaagaggtgttactgtgggtcttcctgtcagctcagttctcctacccttcttgctgacagaggaagaagaatcccactaccttttagctggaggttattctcctgatctcactgaatcttatttcttggagtagcaaggaatctgcaaaacaatttgaggctgtctttctgttgcaaatcaaagccccaacctcttatttgggtcttagagcaagagttccccaagtactttgaaattggacccttctgtacacacctggagtcaccagtaagccttgcccatagattccctggtggatggacacacaaagctaagggcaaaggtgaccttttcatttcttcttcaggtcctacaatgcctttgaaatctttatgatctgcaccttcagggattatacaaacagcttgaggaaatcctaaaattgtgttttctccagataagcatccaggtcaaaggaaagacctctgcatgccttcctgatagaaagaaacttgcctcaatttagagaatgccaccaagaacaaaattggcatgcagccatttgtgcagtgcattaaaaaccagtttacaaatagtggtacaattctggaagtgtcagacctcatagtgtggtgtagtggaagtccacagactatttaccatatttcaaatgtcttactgtttttaaacagcagcacaggataaccagagtaacacatttctttgtttctgtctcgaataacatcaattaagtaaaaataaaatttattatcatgcaagttataagctttccttggcaattatattttgatatatttatatgctaattttaacaaattttggttaacatatcttacagcagtattttttatattaataacggtaagaggaacagttacttttttacttagctattggttaattgagattattttaaaagctgtgtgaccttggaaaactgattaactaatacaggtatttataagatgtttggtctaaaataaggtatttaaactacctgagcctcagtttcctcatatagaaaaaatataccctcctcatatggctgttataggggaaaaagacacaatatgcaaagcacatagtacggaggcaaagtatctggcacatagtatggttcaatagataaataattttcccatagaaactgcaaatttatatatgagacaaaaaacatttcaagtatatgttcttgagggcagggagatgtaaggtttttaaaggttctttgataaaaaggttggagcatggctctttggctctgatcactccattggatacttaaaacaatgatcaactctgtcatcagaatgaaatgtccactgattcatctccatttcttaactaccaagcaacgttcttttgagggctttcacaccctcacgtatcctttccacctgaacctcagtggctgactttaccccaggccctgaaggcagaggtggagctgagctctgtgtctgggaagagagaagcaggcacgtcctctgatccttgcccaagggcctgctttgtgagtggggcatcaatgctgcttttgttccacctttagcgtctggcccacagctgaactcaaagaggctggctgctcggggcaaccctggcccacaaaggacagacagcaccaagcccagccaagggttcactcaagaccccaagatccagcacggtggttctccccactggggaggcagcctcagggaacattctgtctgcctttggcattctaaaccatttcgaatttcatgaagataagtcagaggttttaaatgtgatatcactgctgaaaaggccagagccatcagcgtagaaccagcatgtccttgctaattacaatacacaatcattgccttgtgttgatgcagtcatttgctcattcatcagctattaattgagttcctactatgtgctcaatgtgatgctcaatgtgagggacatggaggtgaaaagatgatgtccctgcccttaactctctggtgtactggcaaataaactgtcacctgctaagacaaatagaacataatatctggacactataacaaaaacctggagaagcagaaacagtctacataaggggccaataataaccattgctacagttgatcaagcatttgctgtgtgccactcactgtgctaagcacttagtgtgtattatctcatttaattcttaaaacacagctataatagtagtttgattctcttcctatctctctgggaaaggccatgcaaagaaaatggcatgtgagggtcttggaaaaagaataggagtttgccaactagacaagcaggggagatcattgcgggcacaggaaacaaaaatgatctgtttggagaactgcagatctttggtatgtgtggagcaaagggaatatgcagggcctcgtgtgagaatagtgattgcagtgaagtgagaactaagtgggatgaagcttcaaatgtggaagactgtaagcagagctaagatgtggaggaaggagactcggtaggatagtgcttcagttagaaggagggatggccacgtttgttggttcacttttgagatgcagagcctattcctagggtaggctatgagaagggaacaatgagagggagaaactaaaaatgccggacagagagtgactagtggagacaggacctcaccctcctctgattggaagaaagataagaagagaaccaaagacatagacacattctaagaataggtgttgggaggcagaacacaggtaagagggggcagaaggaaaagatacgatcttaagagttgtacctgcatgacgcctgatgtctctgaggttaaaggcaagtccaacaaggagagtgagaggtgacagagtattatagaggccttggtgaaaggagtaaaagtttggagtcattgttgagtacgatgatgaggtgctgataacacaaactcttgatttcgaggaaggagtgttcaaaggaggaggaggaaaatgactgctagagagaaaggtgatggatggcatgtgaaaatagttgagtgtgctgagaatcgttgattagagtggcgaaaggtaatgaagggaagacttaataggtgatttcaggttcagacatctgaatgagggcatggacctattccatgcagcttcaggagatagaacgaggtccaacaagtggtcattcctaggagacagattctctacccccaaacattaaacattaaaacatgtaagtaagtgtacattaaaaacattaaaatgtgtaagtaagtagcactatccagcaatggaataatctgcctcttgaaggatttcaatcatctgccaaggatgttgtgctggaaatttggtatgcttaattagatggcttcttctatcttttttaatactaacatatcatagatacttaatatatggagcattgaaatagatagcagccaattttggcattcttgcaggttgtcccactgtctgagccagagaatcttgattgggattttttttttttcttttttggagacagagtctcgctctgttgccaggctggagtacagtggcgcagtctcggctcactgcaacctccacctcccaggttcaagcaattctcccacctcagccttccaagtagctgggattagctgggattacaggcacctgcaaccacgcccagctagtttttatatttttagtagaaacggggtttcaccatgttggccaggctggtcttgaactcctgacctcaagtgatctgccctcctcggcctcccaaagtgctgggattataagcatgagccaccgtatctggccttgattggaattttcagtaagatttatgcagtttaagaactgtggaaacaatcttgattttttttttttattccaggaggatttttgttaagattagcagaagccatgctctagtatgagaaaaatacacatggtattattgagttaacaggcatgatgtgtatataatacttactacggagagggcttctttctataattaaggcagaatgcccatcccttctcattgtggatctggagaggacccttagctgggatgactaaaggaggagcctctgttcttaccttatttggagtcctcttctcatcatgaaagatgtttgcgcatctttcatgccctgtacctttcttttcatttgccccctgcatttgggattggttgctttcttttttggaacctatgagactatttcagtggttctcaactgagggtgattttgaccctcagagggcatttgacaatatctagagatatttttgattgtcatgactggagagggatgctgctggcatctggtgggtagaaggcagggatgctgctcaaagccctacagcgcacaggacagccgctctcaacaaagaatcagccagcccaaaatgacaatagtgctgaggttaagagaccatggtctgtttttaagtcttccttctaaatcagctgccaccaatacactctgtaaaaccccagatgcctacttttattttctaatttaagaactgttgtgtggttgaatactctgtctctgtgaactctacccccacccatcccgttcttcatgctgtagcaataagaaggacattttaaactccctttgaccagaaaagtcacttttggttagggtccaaacaagaaacacatccctccctggataaaggcagagatgccacagcttgcagagaaaaaacatcagacatttcccaatggcagcaactctgggccaagagtacggatggaggacaagctatagatacagccacatggtgcccttcatttgcttttgagtaggagctcacactgtctttaaaagattggacagtagagctcagccatgaagggcccctgtagcctttccaagccaggataagaccaagacggtggtatgaaagcaactgtgactttggcacaaatacagactgagaaaatggtacctgactaggttactcttatgaccctctgagaatccccacacagcacatgctaacatgtacctacacctctgtgtcccaaattaggctgaagttttcagttagccagatcataaattaggcctttgtagctctaagatcccctacccctgaagaatcctaggaaagcctcccttactacacttcatgactcagcattgatagcctgctccaacagaaatagcccaaggctgagatttcccttctcatcccttatgtttttcaggctgagcagtcatagggaaatcattcaaactcttagaacctaggttttcttatctctgaaatgaagacatcgaccttccaatttctgggaacctgtattgaaaaagtactctcaaatacggacataattttatgtacaaagttacttattgcttcattatttaatgttagacatattgtgaaatagattaaatatgacacatttatagaatggaacattatgtacccatgaaaaaataatatacatgaagagtttcattggctgtgaaaaatgcttgtgctctaatgtcaagaataagaagcaggccgggcttggtggctcacacctataatcccagcactttaggaggctgaggtgggaggattgcttgggctcaggagttcgagaccagcctgagcaacatagggagactctacaaaaaataaaaaaattagccaggtttggtggcccatgcctgtggtgccagctactcagcaggttgagatggggggattgcttgagcctgggagatcgaggctgcagtgagccatgattgcaccgttgcactccagcctaggtgacagcgtgagacactgtcaaaaaaaaaaaaaaaaaaaaaaaagcggcaaaatataacaccccccacacacatacacaaacacacatttatatgcttatagtatgatctcaattctataaaatatgtatagaaaaaagtctggagggaaaccaaactattaccaagagtttatactttgttttatgttagtatgtttataacgtttttaataaaaataaagctgaggtatacaataattcttttccctttaaaagcagagcatataactctcaagattgagaaacactgatttacagctgtagacagaactggggccagagataaaattttggagtcatagatgttttagtagagattgattactggataagatcacctaggatgagcctgtagagtgagaagagatgagagccaaggcttgaaccctgggaaatactgacatttagggaatggatgaggaagacaagccagagaagggaataagttcgtggcagtaatccatatgagataataacctatatggattaccatggtggcgttgggacatgcaagggaatgataaagctgataggcattttaaaataaattaagggttgtaaattacatgtacaagatgagggtaatggaaaagccaaatattacttaaacctctctagtttggaatatggaagaatgctgatatcaaggaaagcaatgggatagttgaaagagatgcatatatggtaggagtggggaagaggttaggcttagtcttgtatgagttgggtttgagatctctcttcaagaaaataactgctctaagaagtgcagttatctgaaagtccccagctgcagccccttggggatcggccataccatgcaagctgaggtcaccctctgcccaggcagctctcagccatgactaagcttagaagcagcattagagctgatcctctctgcccatgcgagcctcctctagtaagtaggcagtccttgcacgtgggctccccactaggctgacccagattctgagggctgaccttggtttaagctcttcccattcaatctcccttcttcccactcttctttctcagatatcaagtctgtatcatggtctgaatgctctccctgcctgctcttctctctctccctctttctcttccacaaacactgcccccagtaaatctcttgcactttgaattccatcttggtatctgctttccagaggaccagaaccaacacaagtgatggttacatatccaaaagaaattattgtggaaggaaaatagtacagttcttgaaagcaatcaggattgagggataactgaatctcaagagtctccctaatagcataattagagggaggagtggaggacaaggtttgaatcttatgttacagtcataattgggaaagagtacagttagtcttgtaattgggaagagaattcaggatggtggggggaagttattgaaaaagtagaaggaaactctgggaagtgtaggatcatagaacatgaaatagagagagagcgttttaggaacaggtgataatcagcgcagatgtcatcaaagaaaatctgagtagggactgaggtcttgtatttagagactgacagtgtggctggctggccatcaagtgattatttcagggaaagaatgagaataggtgccaagtttacaggaatgaagaagaaacatagtgggaaatagctagaggtaatgacagtagacctcacattgaaaatgtttgtccatgaatgagaggagggaaattgagctaattagagtaataatttccaagattgagtgtgtgtgttttaggaacacctaaccatttccagaagagggctttaaaggtgctagagagagagagaaaaaaaaaaaaaaaacaaccattgtagaattaaaatgctgaaagcagtgggaagagaaaagctactgaggccagagggaggggttagattttaaacagaagagagaaacctcttttctggaacgtggcaacaagaagatggcagaaatgacagagatataaggggtgagagtgaagaacctcacgcttagaatgtgttcctggtacaaaagtaacaagaccaacctctaagaataagagaatgagatggggaaaatgtgtaaagagagtggagatgatcaggaatggctggtgagcatactgttattccttaagaaatgtgatggggcaaaggaaaatcttgccttaaatgcatgaagttggatctctgtcaagtactggtccaaaggactgtgactctaattggtaagaaagaactaataaggtcctggcatttctcttacatcttgaattttcctagttcaactataactcaagtgttcagagaaacaaactggctttacgcagtccacttttgtaattatcaacaatcatagaaaaggaactagtatatagctacttatttgctttgtttgaatggcactgtactttatcataacaatgggtgataaagatgataaaaatatccaagaaccacaatgctctatgtcagaactaggttgactggagaagaaatgctctctgaagcaaacgttctggatactcaaagactggatttgtacagtggtctttaggcgttataactctgtccaggtctctcaacacttacagctatcaaggaaactttattattgatattctacagaaaaaatcacgattactgcaagtctgtaagctcttaagtatttttcccattgaaattattgtttcattaatataatatattcaaccttgtgctatcttgggtatgcaactctacagttagagcagatcaaagggcagtagcctgaaaggagctgaatgacaaaatccatggcatttctcattagtcttagccagaagtggctctttatggagaggactcatcctggtcttgtgaagagaaatgcactgaaactggaaaggaatgagctggccacatcagtttcttcaaagctgccagttgatatgtctatgtctgcaagtatgacttatgcctgttaattaccccccaaactccttcaacagacaaagctctttattctgctgactttgaagtataatttggggatgccttgagaaggtcaacgcgacaggccagcttttgccctgcagtgggctgtgcaggtgtgtgctagctgttggcttccaggcctgttttattccagccctggcagagtttgcaggaatgtcatgagaagagatttataatactttctgattccatccagtttcaaataattttatgaataatctttctcatagcatactagtaattctacaagcagtcttggccaaaatcaacggagtgagcatgcttaaggaaataattttctttttcctttttaagaaatcattttgctgaagttttacaaacctcataaaaattaagggttggtttgaatttgggagaaagactcactttatctgaactcatttgccaaaaatatttaaatgagcacatgctggatgtaaaagtgccaaagcaatagcatcaattatgcattctcaaccttccagactttccagagtcattaaaaggcagcgttttcctacaggtgttaatgggatcctgcaaagaggaaggtggttttaggtaggattgtgacagagtggctcgtgcgttgggtgctatggaacccactgaggggcttctgaccacagtcccatgcagagccaacaatggcattcgttgttataagcaagtgtcagtcacaagagagctgccattacagagtgttgcccagctttccatattcccaacatggccagaggtttcattctttgagaatgtgtttattcagcctagtaaaaacattaaaaaggggaataaatctctgccgaccccaaaatgcttttcaccacagctgtaaaccataaaacatttagaaaggtaagcaggactaaagataatatagtttccccaagcagcatggagggcagacctggaggtggcccttgcaaagacagctgcagtgcacagagcttccctgcaaaatcattaagacagggacaggttctataaggtgctaaattattattagtttttttttaagttgagggagggcaataataaaaaacatgtgctcagcagcctgcttggccatataaaacagaaaggcctgtgactttaagtgttgtaaaaggggttaattgtcgatttctgaatgtggcaagtttactgatcttgttaacagcaacggggcatgtgccgttggttatcatggcgggaaagaaaaacagccatccatcccttattccctggatgccgttattagtcttggaacccaagttaagggacatatgggtgaatgcagtcttaaaattgctcctttccacctgtccaaatttctacccattctaaagcttccagttccacctaacaactgcatttttactgccatttttcaaatgcctgctgtggatcagttcctttcacacaaaatgtgttgtctatttgtatgacaacctaatggagtgggcaaggatgatacaaccattttacagacaaagcaactgaggttcagagaagttaagaaagttatctatggcgacagagctatgaagcagaggttcaaacccgtctttatattccaagtccaggtcttttcaactagttattcaaataattcatttgttcatccatttactcaatagatagttattggccatgcactaagagccaggtgctggtctagttgttgaggatagagccctggacacaactgacaatgttcctgccatcacaaggcctatagtttaggaagcactagtctaacttccaataaccatcctctcttctaacctactttcacatgcacagtcagcatctgtaatttgatattttattttgctgttgagtattgcacattacctttgagtatggtgtgttacctttggctcccccagctagatgatgagcctggtgaaggcagggctgttgtctaatatttctctttttcacagtctacccagcacaacccattaaataagtgctttttttctcctgtagaacatctttattactgtgatcttaagatcatttggggttttatttagagcttagctattgcagcttctgttattgagctttgtcaaatgttatgtttatattgtctcattagtgctgacaccacccaactataagacccattttacagtttaggaaattgtggcttatgagggctgagaaacttgcccgagttcttagagtcagtaagaagaaaagctaggattctgccagtggctgaattcaaaagcccaatttctgtataccatgtacttgagcctgagcagtgagggaatctttgcccacctgaaacatatagagaatatcaaaagaccctatgatatgatatacatgatacataaggtgaatttaataccagccattgattcatccagtcactccaatcactcagaccttcatagtaaaattcatgtggcatcttggctcctgccccaccctctattttgtggtcttcttaaaatgctatcttttttcaatagaataattttcaaaggaatccctgtgttcctagaaaggtgacaaatcagagattgactagcatgaggagggtagtggaaggttcacacctgtttgtaataactggcttatacaaaacgtaagtacgaacacaatggatggcgattgtgttctgccaatgcggttggcattcattctgagaaaagatggcagaccaaggccagagcatggcccagttgctgaaaatcagaaccacactggagccaccagggaccctggtaactaggtggagctgaaccatttatttctgttttgatggcatagtttccactttaagtaatgtgggcttaatcttcatttacattcttcaatctacacagaagtgtatttattattgtcttgtgataagcagtagtgttaatataaagcagtgctccctgaaactgcagacagtttccaaggtctgggcaaaaagaaacaaaaatgtagggaggggagccctgcagcatgacaagagtttttgaaaatgaaaaccaaaaaaattttaaagaaaatgaatcctaatccttttggaactttcatcagtcagtctgtcgacaaggaactgataatttctgaatgtgaagatttggataacaaatgagttacatgtataactaggcttttgctgggtttctctatgtagataatgactcaactggtgagtaccatcagagaaaggccagtacactgggtggcctgtggatgcttgtgtttatttgatgcaaggctcctgctttcgttggggattgctggaagagtgacacacaccaagctacatttctgccagttgtggttttgagataacaaggcttaaaatttgtatgccaaagttaaaattcatgatctttttcctgtgggcacattttagttcagtctctttgctcaaaagaatttgacaccaattattgcttttcagtactattgagcatgagacaatctatagaataatccaaaaaggaagatctataattatacaccttctcataaagggatcatggatattattgctatgtatgtccagaatagctcttcttacttttgaggagtaactattagagtcttaccaggtgccaaccacagtgcttcacattcttgccacagagactggtccaaggataggcagatgacaaaaccaggcaaattctaattcttccacaaatgttttctaatatagagctgccaaaattgctctcctgcattttttaggtgtgcaattgcaatataaatctgaaaatgcccatggccatgaaagatctggaaatgaaaaatagcattatctgattctttggatctagtcttccctgagccagctccacttttcccatgcatggggcgggggggtcggggctagcgagctaataaatatccttttattgcttaaactagctccagttctgatcccaccatttgtaaccaagtgtcctgagtgacataaataattaaatcaggcccagagaaatatgacccttagtatctgacaattaggagaagcatacaaaccataaattaaatgacataaaaataattcttatgcaaaagacagtatacctcaagacatgaagggttgttttgaaatccttggaaagcaatacagactgcagaatataattcttgtgggagaatcagtctccacagtgttttctgcagaactgagaaagtatcacctacctgccagagcagggctttaaaatgacaaatctggtttgttctggacacagtgatttttttaagaattttttttactatactttaaataataaaaatatattttcattgttattaaatattattataatacttttattggtattttaggagcattactccaaagatggtgagaaattattatatacaaaattgtaatgtgtttcaccttcagaatgctattttattttctcagctaatgattattattttagcaagatttgacaataatagtaaaataatcgaaccagtatttttttttttgagacatggtctcactctgtgtctcaggctggagtgtagtggcataatcatggctcactgcagactcaacttcccaggctcagatgatcctcccacctcagcctccccagtagctgggactacaggcacatgccacaatgcccagctaatttttcgtatttttggtagagtcagggatttgccatgttgcccaagctggccttgaactcctgggctcaagtgatacacccacctcagcctcccaaattgctggctttataagggtgagccaccgcgccaggcctcaaagcagtacattaagaactgttcgtgtaaataagctctgttgagggacattaactggggaataaagtggctggaaaggacacattgaactcctttttcatcttctctgaaaatgttaataataactgagacacatctctgtgtctatatctatacttttcataagtgaggaaagaatatgtgaaaatttggccaaaacttaaagtttttgaatgcaggaaaaggtttgttattcacagtggaacaggggaaatgtaagaagatgatacggtttggttgtttccctacccaaatctcatcctgaattgtagctcccgtaattctcacgtgttgtggcagagacctggtgggagataattgaatcgtcggggcagtttcccccatactgttctcgtcataatgaataagtctcatgaaatctgatggttttatgaggttctcattcccttttgcctgccaccatgtaagacacttggttctcattccctcttgcctgcctccatgtaagatgtgcctttcatcttccaccatgattatgagacctccctagccacttggaactgtgagtccattaaacctctttttctttataaattacccagtcttgggtgtgtctttattagcagcatgagaacagattaatacagaagtcttctgcatattgaagagaaaaagcctattgtcttctcaatgtccagatcaattgcatttattccaagtctggggtgtctcatggttcattcaaggaacactgacagtgagtcatgtgacaggccttgggaaaaaaacataattgtgttcataaatattattaagaaaagcagaggatctcaaaagtcagatttggatgaacattagttgatgcattgaaacatggattatgtcaaatatcccatggattctaagctgccttaattgtaaaaaaactctttgatgctctgcttagtacgtaagcaccttcaattgctgtcaagtgtacatacagcaacaattaaagataaacaaataaacatattgggatatgctgtcatcagagtacagggaaatgacccaaaagctcaatgtttccaagaggaaattagttccgaccccacgtggccattgttacagactagaatctggattttgtttgctcttgattacacagaggaagaaacaaaaaataagttgtcctggtgataagcaaatggctgggatggttttcctcagtgaaaatcaatgtgatgtcttattcccaggcctagagataggtgggagatggggagggaagctatttagtttaccagcattactaaagttgcccttttttccctggtggatttccttttcctgatttcagagcttagagaactcagttctgtctagaggccctaacattccacttcccacactcagcatgggcctattgtcatcatggacattttttaatgtataattcaagtaatcctcaaagcagccctaatagtttggtatctttattgttatcagcctctcttgagaatcagaaaagttaaatacttttttaaagatcctgtagatggttagaggcagctaggattcaaatacccatctgtctggatctgaagcctatctcttaatccccaaacccactgcaacatgcagtccattctcacatgtgcaagtgcatctaacccacaaatgctttttttaaaaaaaatattaaggatgagctggtggtgtttcctccataccccggccagtcacagtttagcatcatgggataagtgtgggaaaggtctgactagagtagaaatacagattgtgcccagccttaaaacaataacatgtttctttcacatttcacattaacaaatctaaacagctgatgaaatactgtaatcctaggattatataccatgaggagcctaagaacccctttttaatttatcaaagattcagtatatttgtaatcacatgtaataagtgaggttgctgatgtagaggaaaaagaaatgacaatctttgatcccattgtaccctgggatcccgaaaatcatccttagcctgctggtagccagtctggtctttggtgttcctgggcatgtgtcccattctgagccatgggaatacttcttctcatgtcctaccctctcacacataatgcccacctggtattcttccttctcactccacaccacactccccaactaaccacagccaccattatattctcttcttccctcttctccccttccctgcccttgcttcctttcttctccatgtgtctcttctcctactctgttcccaacataagatttagcatgaagccatgccttttctcctcaaaactgagtttctcaaagatcattcacctccatatccctgcaggaagcgatgggtatgagcagtgtctactagttggatggacagatcaagggatggatggggcttttgaccatgtgtttctttcaagacttgttgaagtcattttattcagtgaacaaatagccattttgatatcatttcttctcccctttcaaattacttattacaattttgggtgtgggtttatggtgggtggcggtagttgcccatgcttttggagctgagatgtaattcttccctccctccctccctccctccctcccttcctccctgcatgcctccctacctcccttcctcccttcttccattccttccttccttccagaaattctttagacaagcaaagaaagaaacttcacagagactttaagcagtttatatccaactatgtgactcctaagaggtgaccgcaggtggtttcaaaaatcttctgggaatgatcccatgttatataataatgagaacactgagcttgacatcaggaggcctggctttagctttggtctcccttttcagtatgcctggaattctgggcagatcacttggcctctctgtgcttagttttgtcatctgtaaatagggaaggtaggactaatgagtgatttttaaactgttcctgggagccctcaaagattcatggaggtgtcttgagagtctgtcctacaagggatgttatggtagagaaggaggtggttgcatagatcaggcagggctgagtccctcattcctacttcaacctgaattaatgttctggtgaaactttttgaatgtatcccatttttaagctttctgctagaaaacctactccaaaaaagtttgaaaactaccagactggattatctttaaggtgccttccagcatacctgacttcaatatataaattatctgtgtgtgatcttcctttacagaaataatggagcctttcttttcctcgtgtggttgttgctctaagaatgcatttcttatcaagagaataatctgcttttcattctgcttcctacctagctcaacagagcacaaaatgcccaagctagatcccttattcccctgtgaatatcttctgtttagactcatccatcatcggtggggcttatgacagacatagatgttttcacagttaccacacagggccaactgttttagtaagggtgaccacttaggacagctttgggctcttgagctgtcctctgttgaagccgggaaaccctaagctgtcatctaagcaacgccgggttgttcatccactttgaaagagacaactttatggtcctgatgacatttcctatattatattaaggatgcatcttgagaggatgtgttgggtttgttttctggacaagctggatgagtctctctctctttctgttttagccactgccctttgtagggtttgtttttcctgctgtcccagaatagatgacttaatgggttgctgaaaatgtccaggctgcctctggctctgggggtagctcggccttaacaatggaaggcatttagcagagcctcatgttttagagcaagaaagacttgagagagcatctcatctggtatttttcaagatgctttttaattttttaaacagcaaaccttttctttccccaatacaaatctgacacaaaacctcaatttataaaacagatttttaaaagaggggtgggaggtaggagaaattctaccaaatggtactttccttgctatttatcctccccccatactacctcctaccacacacacacacactcagcaatacctaagcacttctagggaacccttggcctcccaaaagcaatagaaacccccggtcctgaacctctttttttttgtttgtcaggaaactgaaaaacagtgagatacggtaacttgcctaagaccccacagctagagatctcagtgccagactgcaacacttctaaatctggtttaatcttcctctccacccctctctaatttattatgccacttcacctttgaaccctggaaaagggcaggaagaaaaaattatgtaccagtgtgctcaattcttgtacatctgtctttaattctcaaagcaactttacaaggtgggcattattattatgcccattttacagaaaggttaaatcacttatccagtgaaactcagccagaagtggcagaacttacattgaaagctaggcctatcaaatttcaaagctgttctttctactataccacaggattaaacaatgccaactattgcttgtcataaatgaaaccctctcttaacataagtttgactcaaaaagtctgactcataattcatgaaatactaagtaactcttcttaaataactaccatagactgtccctctccaaagttttctatgtctattgcaagcatgttttgcctttaacaaacaacacccctttctctgggaatcattctctgtcattcctctaccctatctcatccagaaactggggctctagaaaccatgattttgatgtttaattcaagtctggtcttgagtgggccaagctaggaatgaggagcaggagagagttaagacgtaaaattttactcactgtatggattgagcagtggaaagagaaccaagaagagagatcttgtgacaacttacatctccggtttacttttgcatttcagttcaatgaaacagcctacttaccatataatttagtctgccttttttttcctgaagctttggtgtttgtgtgtgtgtgttttgttgtttttgttttgttttgttttgttttgttttgttttgtttgagacagagtcttgctctgtcacccaggctggagtatagtggcacaatcttggctcactgcaacctccacctcttgggttcaagcgattcttatgcctcagcctcctgagtagatgggattataagcatgtgccaccatgcccagctgatttttgtatttttagtagagacggcgtttcaccatattggccaggctggtctagaactgctggcctcaaatgatccactcgccttggcctcccaaagtgctgggattacaggcatgagccgctgtgcccagtctccttcctgaagctttgaatttatgttactagcaaaccaaacaatcctactgactatatcatcaaatcggatggcctgaggattcttcaggtagattcaggctgccttcttgttgcagtcagtcatgcttattttacattcatatcatacagtgctgccatgattggagtcctcagcaatcagttattccagtcctctttgtttatactgaaacaagtcactataaaatctcctgttcacatggataaggtacagtatccagagaaagccaatcttctctagccttattgattttgtctcttagacttctccctgctggacagaaaatgtaaaataggaacgttcaaaataaataagccagggatactaagttcaattaaatagaacaaaatgctttatattttacaaacattaacttgagaagagaaatctaagttattatggtctccaaatggtaatagcccaaatttctactagcaataagatagataattatggtactatgtattcatacagcaaaataatatacagcaacaaaaagtaatgaattatagttacaggcagcaacatgggtgaatgccatgttaattcccatttgtgatagaaatcaaaataatagttacctcttgaagggaatgaccaggaaagtcataggggaggttcctgggtgccataacatttgatatctttatttaggtggtagttacagagctgtgttcactttgcaaaaattaattgaattctatagttatcatttgtgcagaattatgtatgtatattatacttcaattgtaaaagcttaccccaaaaatatctgaattattagaaattagacataaaacttacttcctctaggtcatggtctcccattatataaaacaagaaattaaactcaacattcttaaaactggaagtgatctaaggaagagtatctagttcaaacatgaaatgttttacagaaagagagaccgtggccaaagaagtaaagtgataggctataaattatgaagtttataattggtagagccaagattagtccttagatcttttagctatgttaacaaagatattctaaataaacctcttaatactattctaaaataatttgctctgaagtatacttttgtactaggaacaaagggtttgtaaaataaataaataatgtgaacaataccatcagtgtttgcatagaaacaatatgatatcattcttaaagataaaatccctttgtcactcactccatgagataccatctgatttggtttctgaaaattttggcaaaattatacattgcttgaaatctcattcccaggatgtatttgaaataaagtcttttttttttaattttttactttaaatttcaggggtacttgtgcaggatgtgcagggtttttacataggtaaatgtgtgtcatggggtttgttgtacagattatttcgtcagccagatattaagcctagtatacattagttatttttcctgatcctctccctcctcccactctccaccctccaataggccccactgtgtgttgttctcctccatgtgtccatgtgttctcatcatttagctcctacttacaagtgagaacatgtggtatctgcttttctgttcctgcattggtttgctaaggataatggcctccagctccgtccatggccctgcaaagaatatgatctcattcttttttatggctgcattgtattccatggagtatattatacatgccacattttctttgtccagtctatcattgatgggtatttgggttgattccatgactttgctattgtgaatagtgctgtaatgaacatactcatgcacatgtctttataatagaatgatttatattcctttgggtatatacctagtaatggaattgctgagtctaatggtatttctgtctttaggtctttgaggaatcaccatactgtcttccacagtggttgaactaatttacactcccaccaacagtgtatacgcattcctttttttctccacaacctcaccagcatctgtttttttttttttaataatagccatgaaataaagtcttgatgatgataatgatgatgatgtcaaggattctgacaatgtaaacaatgatgacaatggtacagtcttatgggtggtatgttagtttcctcatttgctaaattaattttttaatggctactctaaaaaagtagcacaaacttgttgactgtcttacagttttgaaagtcagaagtccaaaatgggcctcactggcctaaaattaaggttccttttggaggctcaaggggagaatccattttttttttgtcatttccaggctttagaggtgacttgcatttcttggctagcagccctcttccaaattcagtcagcaacagacagtggaatccttctgaacactgcatcattgtaacattctgactttctgcctctttcctccatatttaaaggatgtttatattccactggacccacccaaaaaattcaggagaatctccttattttgaggtcagctgattactgatcttaatgccatctgcagccttaattcccacttgccatgtaacatattcaaatgctctggggattaggacattcacatttttaggggcctttattctgtttatcacagacaagattgtatttatgcatttttgaaatacatacatatatacatatttcatatagtatatatatatataaggccttgagacaatgctttctttacctagaacaaagttattttgtcctaggtataattatttccattttaccaagggaaaaaaaaagaataaggtgaagcaaattgcctacatttctggagctggttatggcagagccaggactggaagccagatttccaaacccagtgttctcattcagtgaaaagtggttttcctaaacccagctgtcatgttcctcaagctccagaacctctggagggtgagctgtggtggacaatttgagaatttaggtgggttttgtttcagagattgaaggatttgagagatgaaggattggcagttgctgaatagtaagtgctagtccatggacaaatttatgcaaaaggctgcgttctccgtcaatttacacacaattgctactcatctgtaagacttagcatctgcctcacactcccctatatttaaccctcagcctggatcatgtgcttgtcacaaatcaatatttctgccactcgacaggaacttcagccctttcaaattcgttccaggtaatttgaggagactccagggcagtgatgaaataaagtgaaagcccctgatttactggatctggaggcttgtgctgtgagtgagaagtgagggtgaaagacccttatcacaagtatttgtgcttttagatgcactgagtccccacccagaggtaggctccctgccaactcagtcccaaaccccctctgaaatggggaagaaggggcccgggctgtgcagttcaggtaccacaaggtcttcatttgtgcttgcagcaaatagaaaagcatgtttctgacttggcccctagtgtgaggtctggtcttggaggttccgcggtctctcttaagactctcactggctcacctctgctgcccctccacatgccagaattctcaggcaaactaagcttaagcacaaactagggctccagtgcagcccagaacttaaagcactttgctaggtgcagacctggctttggtatgagtctgtgtaatttgtcccatgttgtcacagttgtcagtcacacctccctgtttatagtggttccagggctttgggattcttcaggatcagtcctgcatagtccagccagaggggattactgttccccaaggtactacaggcctcttctttcatcccagctgactgtggggcagaatcagctctgtgatattgataaagaactgaaatagatccttttagacttcaggacttcatcagcctgaaataattttctcagtactaaataaatagttgccccaacaatgatgaaaaataaatatcggggctatgggtgaaataagttgctgaaggaaatttaatgttatcaataatataatggaattttgccctgttttacagttcataaagcactttcacacatgttattcatgtcatcaggaaatgtttactggcgggccccagtgctggagatacaccaggaagtgaagcagagattgtgttctcgcaggccttcttctgggattataaagtggggctgctgaggagtgaacctgtaatcttacacattagcgtatactcccaccatggagccatatcctgctcacagtgcatgtcatcacaaacaactccccgaggcaggcaagactgttaatactacctccacatcagggatcaggcaattgagcctcagagtggtgaagaatcttgccaaagccccacagattgatatgttaaatctgtgttcagttctggcgatccttccaatatgctggtttgttgcaaagcacagtgcctggtccataggaagccctcagtaaatatgaatagctgctaagtgctcagtcaatgccacctgctattatacttgtcacggtggtgtgagaaggataacaaaagtcatcggagcatctgaactcatcagaggccgccagaggaacattctgctccagagcatttgtgttccaaatggaaactataaaagcaaaaataaaatgtttatattttctagttggctgtaaataaagaaataatgataaaaataaattagttgcctgacctaatgctttaaagtttgcagattgagtaatgtctttttccgacagtaaatttagttaacagttatttgtaaaataattaaaatttcaagtaacacatgctcattttgcttaactaagtttgtgggtttattgttgaaaataaagatcaaataggccgggtgcagtggctcacgcctgtaatcccagcactttgggaggccgaggcaggtggatcacaaggtcaagagtccaagaccagctggccaatatggtgaaaacccatctctactaaaaaatacaaaaattagctggacgtggtggcgcgtgcctgtagtcccagctactcaggaggctgaggcaggagaattgcttaaacccaggaggtggaggttgcagtgagccaagatcacaccactgcagtccagcctgggcaacagagtgagactctgtctcaaaaagttgagtttatttttcagctaactggctattttaaaattttggaaaaatttaaaaatattacaaatcatacacaatagatgttgagttaaattcaattcagttgactttattgatttggtattttttttaaaaaaaagttgaccatgtgtggtggctcgtgtctgtaatcccagcactttggaaagctgagctggaaggatagcttgagaccaggagtttgagaccagcctgggcaacatggcaagacctcatctctactaaaaataaaaaataaaaaataagctaggcatagcagtgtgttcatatagtcccagctactcaggaggcacaggtgggaggatcgcttgaacccaggaggttgaggctgcagtgagctgtgatcacaccactgcactccagcctaggtgacagagaaagaccttgtctcaagaaataagcaaacaaaataagcctatcagtaatatccccaaatgttaataattgataccttgatttaaagatagtgatatctatttactttatatcagcatcacttaattttgataaatactccaagccttcattttgtttttaagtaaaagatgtaaaactcatctgggaatatatcaaacccctactagtgcctgccctcaaatgatcaagcctacacatagctgagtcgtaacaaatgtgttttaagggaatatcaagcattagcaatctacccaccacaggaaaacatctaattctataggagtcaagagttagtcctcattctaaatgcagatactctggggtgtgtaattcaacccatgtaagtgccccctctgtgcctggaccatggaatagatcgttcataagattgctgcatctcaggagacgggtcttttcaggagcactggatgattaggccaagttacttgggaaagccagtcactgtatttatttttacaagccagatgctggcacgtagtgcattcttttacaaaaataaaagggatttggagaaaaagaaaggttcagggtcacagatgaaatcatgagggtattttacatggttttatgggtagaaatttttacttttaccttctacaatggttctaaaaaagccgttgagctgctctgtgcagaaagtaaacagggaagagttttatgcccacagtagagtaaaaaccttaaactgggacatcaagggactccatgcctgaggccgtggagaggctaatagtgccacggggtagggaacaggggagtctctgttcaccatggtcctgtctcattcctaaggagtctttgggagcccatagttaagctgttttgataaacactaagtaataaccagatatggacatgtggaattgattaagagaggagggattaactaatgcactaaataacccatcatgcgtggtgggttggggaggaggtagagacataatggtacaagctcctgacgaagaagggccctgagattttccttcagcccacagatatttactgagcacctactgtgagccagctcctgttctaagaacgaaggatatgacagtgaaacaggcacaaattctgctctattgcttgtggagcttacattcttgagggggaacccaaggatgcttaagaagagacagaaatcacaatgagtagaaagagagtgatgtggtagaggttgctactttacatgggttgattagaggaggcctctccgataaggtggcatttgggcaaaggcttgaatgaagtgagagagtgagccatacgtttatctgagagagaggcagataattccaggcaaacgggacagctaacctaaaagctttgtgacagaatcatgtttggcagaatcaaggaataaaaaggcatcttagaaattgcttgggtaatgctttaagatcaattgtcatctcctttcaacttgttacagactcctgcttttaggtgtatgctatatagttattggtcaaacattaagagctggtccccattaataactataacacttcctgtattcaggtgatgagaaaaagaaggtcctgctctcaagaggtgcaaatagggctggggagaggtctggagagaatgagagacagaggcaccaatagctaagtagactagaagtaggtagcagaaccctgacctccacatttctcctgtttgttttaacagctccgcttagcagcaccacaagaaggagcgtggaaagtatggaatcagatctgtttgtgcggtttttacatttcaggcgattaagtgaaatggtaaatgaaaccaaatctattgcctctatccctgtcagtgtgaggcaaagagggaaaataaacttcaactcctggtgtagacagtggaagggtgagacaagcaaacccagctccttcacacccacttcctttcttctcacaaagagaagtccctctcagtccctcagagcttacattgatgtgtccagagagggaggttaaggaaccctggagattcattgttgggcctcatagctgtgcttttattcacctgtcttttataaatgtccactgtatgccagcattgtgctggtgatacaagtgctgtgatgggaatatgcacaaaggtgggcttagaaaaatcttcctgaagaatgcaacaggtatctatctcaaagccagacaagtagggtttgatcgccttcgcttttttaaaacagttccttcattgttaatctgctcaattcatctccgagccatggtctagggcaggatttttttaaccttgacacttgaacctggataataattccttgttgtaggggctgccctgtgtattacaggctgcttagcagcatccctggcctccacgcactggatgccagcaacccctttctccccaatttcgacaaccaaaagtgtctccagacagcgccagctgtcccctgggatgacaatcacccccctgttgagaatcattggtccagatgaggaagtcccaggccaggcctggtgttacttacaaactccaggtacacaagaatgaggctcttcttatgaacatctggtctcattttccactgaagtttgaacaataggaaacaggctaaaaaagcagcaggaagatgttaggttcgctatggaaaagaatttcctgcttaagaagttagtaaggactgacttggcgatgtgggctcttttttggttccatatgaactttaaagtagtattttccaattctgtgaagaaagtcattggtagcttgatggggatggcacgttgtgcacatgtaccctaaaacttaaagtataataataataaaatttaaaaaaaagttcaaatgcaaaaaaaaaaaagtaaggaactagaaaatctcaatgcaacatttataaaatatcctctagatatgtgagtgaaacaaaacttcattaagctgcttatttaaagggaaagttaatctgcagtagaggacaaagtcagaaatagttgctttgtttcttaaaaaatatataattgccatttcaatatatttaactgcaattatcaattaaaatttgcctgaaatggttggtgatttaaaggtgttttctgaggctttgagaacttagtatattaactgaatgtgaatgactttcaaatgagtccttataagtagtatgttttcataagtgaatacacagtgttctctaaataactgtggacactgttaatttttctgtattactgaaaatatagatttcagttctcccattatctgaattaacatgactccaagttagttgtgtctcacttcaccttaaaaaaaaaaggtttctatctaaaaggagggaaagaattaacattcattgaccacccatttgtgccaggctttgggcaaggtcagcagttctctagtgagggggattttgccttccagggaacactttgcaatgtctacaaacatttttggttatcacaactggaaaggtattatatgagcatctagtaggttaaggccagagatgctgctaaatatcgtacagtgcacaggccagctcgctccaacaaacaactctccagccccaaacgtcaatagcgctgagattgagaaactctgcactaggctatatatctatgttatcttatattacccttaggacatttcttaaaacatctttactattattatcccctattatagatgaagaaactcaggcttagaggggtgaagcaacttgttcaagatcctaaaactagtacatagaagagtcagggttcttatccacaccctaggtgctgtgggcagctgtctctaccacactcagctgtcctcttgtaggtggtttttaatttattatcattattatttttacttaaagccatgtgtgacaggactttgcaaggaggatgctgatgagtccaaaggaaaatcacaagtgtgcccagtcctctactaatcaatatagcatgaagtcatatacatcctgtcccctcatgggtaataaattcttttttttttttattttactttaagttccgggatacatgtatagaacacgcagatttgttacacaggcatacatgtgccatggtggtttgctgcacctattgacccgtcctctaagttccctcccctcacccccacccttcaataggccctggtgtgtgctgttcccctccctgtgtccatgtgttatcatggttcagctgccacttatgagtgagaacatgtggtgtttggttttctgttcttgtgatagtttgctgagaatgatggcttccagcttcatccatgaccctgcaaagggcatgatctcattcctttttatggctgcatagtattccatggtgtatatgtaccacattttctttatccagtctatcattgatgggcatttgggttagttccatgtctttgctattgtaaatagtgctgcaataaacatatgtgtgcatgtgtctttatagtagaatattttatattcctttgggcatatacccagtaatggggctgctgggtcaaatgttatttctggttctaggtccttgaggaattgctgtactgtcttccacaatggttgaactaatttacgttcccattaacagtataaaagtgttcctatttctccacaacctcactagcatctattgtttcttgactttttaataatcgccattctgactggtgtgagatggtatctcattgtgattttgatttgcatttctctaatgatcagtgatattgagcttttttcatgtttcttggccatgtaaatgtcttcttttgagaagtgtctgttcatatttttcacccactttttgatggggttatttttttcttgtcaatttgtttaagttccttatagatgctggatattagacctttgttggatggatagatcgcaaaatttttctcccattctgtaggttgcctgttcactctgatgatagcttcttttgctgtgcagaagctctttagtttaattacatcccatttgtcaattatggcttttgctgcaattgcttttggcgttttcattatgaagtctttgcccatgcctatgtcctgaatggtattgcctaggttttcttctagggtttttatggtttggggctttacatttaagtctttaatccatcctaagttaatttttgtataaggtataaggaagggtgatccagtttcagttttctgcacgtggctagacagttttcccagaaacatttaatgaataggagatcatttcccgatcgcttgtttttgtcaggtttgtcaaagatcagatggttttagatgtgtggtgttatttctgaggtctctgttctgttccattggtctatatgtttgttttggtaccagtaccatgctgttttggttactgtagcctgtagtatagtttgaagtcaggtagcttgatgcctccagctttgttctttttgcttaggcttgtcttagctatacagggtcttctttgattccatatgaaatttaaagtagttttttttctaattctgtgaagaacgtcaatggtagcttgatgaggatagcattgaatctataaattacgttggacagtatggccattttcatgatattgattcttcctatccatgaggatggaatgtttttccatttgtttgtgtcctctcttatttccttgagcagtagtttgtagttctccttgaaaaggtccttcacatcccttgttagctgtattcctaggtattttattctctttgtagcaattgtgaatgggacttcattcatgatttggctccctgcttgtctattgttggtgtaaaggaatgcttgtgattttagcacattgattttgtatcctgagactttgctgaagttgctcaccagcttaaggagtttttggggtgagatgatggggttttctaaatatacaatcatgttgtctgcaaatagagacaatttgactctctctcttcctattagaatatgctttttgtctttctcttgcccgattgccctggccaaaacttcaatactatgttgaatagagtggtgagaagagggcatccttaccttgtactagtattcaaagggaatgcttccagcttttgcccattcaatatgatattggctgtgggtttgtcataaacagctcttttattttgagatatgttccatcaatatctagtttattgagtttttaacatgaagggatgttgaattttatcaaaggccttttctgcatctactgagataaccatgtggtttttgtctttggttctgtttatgtgacggattatgtttattgatttgcatatgctgagccagctttgcatcccagggatgaagccagcttgatcgtgatggataagttttttgatgtgcgggtaataaattcttagcacacgggtacagtcttttgtttcactttgttttcctcgttattctgtaaacctgccagtttatgcacgtcaaaggtctagaagaccttgccagttcctctgtccagagtccccaccctgccactgaggagtagcatgcagtttcacaagtcgtgttaccccaagagcttcggtttcctcatctgtaaaacaaggatgataacactttcctcacatgattgttgaaatgatcatagagtaataataatagtcagaggtacaatttattatgtgtgttatgtactgggcgttatattaagtgctctacacgtattatctcatttaatttttagaataaccttttcagtagttgttgcccccattttgcagacgacaaaagtgaggcactgagaggttgtgtaatttacttgagtgcaggtggtcagtaagtagcagagccagcatttgaacttagaatgtctggctctaagcctcagactctcttaaccacaaagctctctgtcaagtgctatacaaatgtgagaattattatgagcaatgatagctagtttaggtgattaaaaagctttatgtgcttcagagagttttcacagggtaatcatcataaattcctttttcatcgtctttgctgttccatccttgtgatcattatgcagtacctattatgtttcacctttgtgtttttttctttcttttcacaagtttaaataagggaactaggggtcttttttttaagtcaagctttgttaatagattttcagaatgcacattaaagtgccagaaattgagtgcttttctgattagtaaagattgtattggtttttttttttaacaattcactttttagatttctattttaagcccacttagagctgattacaataacccctatttataaatagaattttactgggcctcacctctgacgtattttcaaattcagtctcactcactctaagtaaaataatcattcatcaagtgaaggtagggtagaataagagcatatttctgcagctacctctgtgttctgagggagccagccataaatattcagcatcggtggtcagagtttggctctgcattaaatcataatcattttactggtgaataaatgacatgtttaattattttatatggatgtataaattttggtcttgatctgggcagcatatttttaacatctggatttttttgttttcttgttgtgtgtgtgtgtgtgtgtgtgtgtgtgtgtgtgtgtgtttaaatcactgtttaggctgggcatggtggctcatgcctgtaatctcagcactttgggagaccaaggtgggtggatggcctgaggtcaggagttcaagaccagcctagccaacatggtgaaaccccatctctactaaaaatacaaaaattagccaggcatggtggtacatgcctgtaatcccagctactagggaggctaagccaggataatcacttgaacctgggaggcagaggttgcagtgagccgagatcacaccactttactccagcatgggcgacagagtgagactccatctaaaaaaaaaaaaaaaaaaaaaaaaaaaaaaaaaaaaaatcactgtttagctttaagtgctaggacacaaaatgtgaagtcactgtggtctttaaaaatctcaattaaccagaacattcaaattgctgggtgtattcaacactccacttctgggataaagagttaagtgacaagggcagagctggccgtgggaatcactatggggctcccagtgcctaggcaagtcaggttgagtgagcctccactccacccatcacataacacacacacacaccaatacaacattctacaacaaaaagttagcaaaagagtgttcagcaatgacagtctaaaatggaaaagtcagagagatgaagtctcaaagggacattctgtattctggagattatgtgtagagagatacagaagaaagtcatttggcaacaagtttcaacaagcttctgttatatgggtcacccttacagggtcgtaagcatcccttgggggattgttaaaaataatgtttaggaccctgtcctagtcctactaaatccaaatctccagaaaacccagggaaaatgatttatttaaagggccacaggtatcttggacacaccccagagctactgaatcacagtctctagagcttgggccaggaatcggaatgcaaaagaagctccacaggtacttctgatacaaacccccggcttagatctctgggggtggttcctggcaatctgcatctttagtccatcctctaggtgtgtcttacagacaccccagtttgagagacatggcatcaactattgttctgagttttatcagagcagaggtagccaaatcttctagaccttatagatcagctccgatgcacaagattggcatgaaaacagcttacattaaagtttacttaaaaattacacatttcctattaattttaatcttcacagtcttatgaggctgctgtagctggaattataagtgaagaaaatgaggttcagaaaggataagtaacttctccagggtattttctgagcactctgagcaggtggcagagtttgggctcaaatcacatctttttgactcaagccctgagctccattcctgcacttatgatgtggtgcacagtgcctagatagcactttcacacatagaatcttccttgtgctatagaagagccctgtaggcaaagttacttatcctttctgaaaaatcacaatctcggctcactgcgacctcaacctcccaggttcaaccaatcctcgtgcatcagcctcccaagtagcttggactacagacacacaccagcatgcccagctaatttttgtatttttttgtagagaacagggtctcactttgttgcctagactggtctcaaactcgtgggctcaagcagtcctccgctctgccttccaaagtgctgggattataggtgtgagttacctcattcaggccctcctgccttccttttattatatggtagggtgggatgggcaggaatttgttgtcttttgggggcttctgatgtccgaatgtcttattaattagccctaccaacagacacaactcagaccagagctaaccctgtcaatttagacatcacttcctctaggaagcctttgctatatccctccagtaaaggtcacatgacctcctctgcacactcagtctccctgtctttgtccatatcacatagcactatctgttccatgaggccaggtattgtccatatgtacaataggaacataactcttaatcaaatattcgtggagttgatgaacaagtgcagttagaatcagtggataaatccttctaatattcaaagcaatgaaggcagctcacttttctcctatgcctattctaaaatcaaattattcttttattcatattgtctgttttaactagattttatgtgcataagtgtattgtaaagtgggaaggaagaccactagaggcaagtacttccttctccatttgatgatgaggaatctgaaggtaagaggcagcaagtaacttttctaaggtcacacagcctatcagatatagagctgggttttgcattcaggtcaattgaacattgaaccctgaggacaggcagctggtaagtatcacagctgagattaaaacgcaagccatctaattcccatcctcatctttcttctgcttgcttcctgcctaaaaaacaggataacaaaggagggttgtttctgtttgtaatttcaaagttagtactcaatatatcacaagggtctcttaaatcatacagtgttcattacctgcatattccttgtgagagttaagctttggtcttcctcattttaccagatgggaaaccaaggccaggaagtttcagcattctcaccagctcttcagaaagctcatgtatcttggaagcagaatgcaggatggtgctggaggggctgagagtaggtaggaaattaagggactctgttaggagcagtggagtaaagacctttaacttgaaaccatttaaaaaatactttcataccatatatttgtgagcccaggtaatttctgaatttctgatccaaatcttttcctccaaaatgcctgctaagaaactctagaggtcgggggtgaagcggggagggagaaggaagaaaaaaaaaaagaaagtacaatgattccattcagaaacttggtccaaatccttgtctctttcttctatcagaaatcctctgttgtcagtccctggcatcacctagagatttccttaccagcagcattcttatgtttttactaaaacttctcctagaagagcatgttttgcttttaggagccagacttaagaaagtgcatcagcttaaaaatacatttgcttgtaatttttgtccatgctgccatctgacaggatttgaggatgcttccatttctgccaggataatagctttgttatctgctgagatctgcaatagctcgacagcacaggaaatctgtgtctcagccccctgctccaagtttagctcatccattacctaaaattgggtttacacaaggaaaattactttagtgctaatccagttgacttgtaaagtaaatttagcttcctcgggttcctagtcccataatctaaactgatttcaacaacagctttaggagtcctcccacacttcttaagaaccctcaggagcatgggtccccagcaagctgaccacagctactagtcatcttcaagccagtgatgtttgctgccttggtacattgtccgtggctccacaattacacactggagggtagggctgggagtagtgggagaagatagccttgggctattcatttcacatttctgtgtctccgtctgtaaaatcctggtaacaaatgaggtgccacatagagggaaaaagtggaattaaatgttttgaacccaactcacagaaaatctgtggagtaaaaagctgattacaagtaacaaaatcttcctttttttctcccttgttcctaagtgttagacctgggttcacttgccacaacttataaaccaatcaaatgtgatgatgtttaagacttgcttacagtggtttccccaaagctaatcaatgaaaagtccttacattccacaaactagtcagctttgcagcaacagcctcaccttcttggggaggcacatgatgtgagtcacacaattttcatgccagcccagagcgttgggtgccattacaaagccatgggtgtcttacatgaatgggagcctcgcggggggttgaagaggctgatctgatctgtggttcctcaattcagaggacatgagcttttgaaaataggcctttctaggtgaattggcctgcatgtcatagtttacacatactgagagctgatcatatatcaataattgttctaagttccattgtgggtgagtgctattgtgatgtgctattgtgtgtgtactattgggtaagtgctattgtgatgtttatcagatcctcatcataaccacatgaagcagtaaaggtattatctccaactggggcacagaaaaaaaaagttaacttgtccaagtcacatagctagtaagtggcaggcctagaattccaacccaggcattctatcatgattactagtggccacgaatcagatgattgtagtaacttgtcctggacttgggagatctgtatgctgactcatagagccctaacagtgtcttaattgatacgcccagtggtttcttctcagtcaccagtgaactttgtagaataggatgcagctggttaccctttcatagcatctttcacccttttttcccacctctttgagactctttttagtgtgctttgttgacttctcttcctctttcaacctcatatttgtggattcccccacaagtttctgtccctgcccttcctccttccctcaccatctaatctcacctgcatacccagtgtgctcatcaattcttataggttcaactggcagttctataaggatgactgaaatttatcagccaaccctgactcttttcccgaatgcaagacctgcatttccagcctcccattggacatttccctatggacagcctgccagcattccctatttcacctctccacattgccgcactaatttgcacagtagccagtacataataagcatgtgataaattggtaatagatgaaagaatgcataatttaatgaaacagttgccaccttccatagatttaatcttccagactgctcttacctaagctactttcttccgtttttctgaatcccctcacttaaccctgctctcaggtgcccctcaacctgcatcttttgtttctctttgttctggtgcctgttttcttctcttctacactcttttatagttatttctgtaaatgtcttttctattcaagaatgtgcatacattaagggaagagattgtattttcttcattggttttcactaaatagcctaacaccgtgcatttcacaaagaggcacaccatatctatggaaagagtgaatcagtgaaagtagacatagcactctgcagtttacaaagggcttcacaggtaccatccctatattctgcagtaggccgaagagatagccgttgagtcattagccccattgtacagatgaggaagctgcaagttagtgtggtcgttaatggtccagaatctcactgctcttaagtttccaagccattcttatgattttaaactggaaggcagatcatcccctcatcatgactttctcccccatgtactcgggaaaaatgagggagagagacaagagaactttggggtgaaaactcacattgggaacaattacaagtgtgtctgatttggtagcttggatgttacaaccactcatcaattttcatgtggcttcaaagaccctcatttgaagctcctaagagcagctcacttcagaagagacccaggtaccaatttattctggagagttccagtgtttcgtcctaaaaaaaaaaaaaagaaagaaagaaaaaagaaagcataaagtttaaacagatccaaggatttttcttttggaatctgacagatctgggttggaggcccaactttaacatttaacaatcgcctccctgcccccatttataaaatgaagataaaaacactcttactcgtggtgatatatgtggattaaaaggataaattttaaagtgcttggcatgactcctggcatgggaactcagtccattttctccctctgcccctgaattgtgcctctgcctttaactccttctatatgtgggaccatgaccggtgaacttggggccaagatgagcctcacctaccaggggtagagagtagaaagcccaagctgatgactgaagctggaagtgtcagcttcttgcacaattgctgccctcttagagctgcttgaggccatctcaacgtgcaacatgactgacatgcagttaggtcattgaaatcacaccatcggaattcttcagcttaatatgtcgcttcttagaaagttaatgcccttttgatactatcagtatgaaatgttgagaagcaaaagctcaaaggcttaattttagaagagagagagcagtttctaaaggagtgactgatgggagagagactcagtagttgactatgcaaaggtgcccagggcaggtgtgaacaacaaagctggcttcctgatacaggtagtactgaaagaaccccggctccacagccctgcagcacctttaaagaaagggtgagggagacatgcttaagcatttttttttctgctccacaacagggcccagggtattgacagtgctgacagaacaactgagaagttgtttaggttggcattaacaaacccggcacattgccttttctgattgacacaattcaaacgggtatcaactgcctttcagtaccactgagaagtggtgaacgatgagggaatcatagggccatccaagtgcattcctagcagggaccatgaatcagccttatcttgtcccacctcctctttacacagggaggtaagccaaggctcaggacatcatcagatatgtgataaatcctccattaactggaatagtcagttaacaagacttgtttgccttttatattgttatagtccaattttggttaagtagaggtaaaataggtaaaaataagatggttgtttgtttgcttgtttttgagacgaggtctcactctgtcaccaggctggattgcagtggtgcgatcatggctcactgcagcgtctacctcttggactcaagcaatccccctacctcagcctcccgagtagctgggactacaggcacgtgcccagttaggttgggattttttcattgaagtgattttaagtaatatgtacagtttcacatctggtaccttgctccaccatttactaactaggtgaccctggacacatttctttatttttatttttataacttgctctgttgcccaggatggagtgcagtggtgcaatcatagctcactgcagccttgaactcctgagctcaagggatcctcttgcctcagcctcccgaagagctggggctacaggcacatgccaccatgcctggctaatttttaatttttatttatttatttatttattttgtagagacaggtcttgtcttattgcccaggctggtcttgaactgctggctttaagcaattctcccaccctagcctcccaaagtgcatttcttaaattcttatatatgcctcagtttactcatctgtataagagggtaaatagaacttacctcttatggttgtaacgataaataaataagataaagtatatatatgtgtatatatatatatcacttaaaaagaataagcactcaatatatatttattttattaatactgctattatcatctgcttttgctctatctctattcctgcctgatgcacctgaaggttgagcggcattgtaaacagagggtggcagcatgagcttaggcattgtgtggaactggatgtgaacttggggaaattgcttcattctctaaacctcagtttcctcatctattaaatgggaggagtaatacctgcctctgcatgattcttgtatggaacaaataagatcatatttataaagtgcttaatacacacctgccaataaatggtcaacatgattatggttagaataaggattctaaaagcattataaagtgccggatcatgaaagatcgtagctcttcattgattcagtatttatctcttgagtacttgctttatgccagatacagagtttggcactggggacccagatttacaatgtgttgaaacaaatggaagtttctcgtgaactcttggtcactaatgagatgagaccatcccgttccaccgcactttcaagttaatccatgctcttctatagaatccttacattccagctgtgggatggctgtgtctcatatctcctcagatcaaaaagcatttctgcgaacagtgatattgaacattaaactggctgcatcaaacttgaaaggatggggcggtgattttgtgtcacaatatttttaacattatgcctggcgaatgtgcacatgttagatataaaggaggtttccaaaggggaagctttactacttggacttttaaattgccaggctgcattcttgggaaagccacataaaagaatacccctttttaaatgagtattacctcaaaaagtatagctcttttacgaaaggaatatgttgttctgaagccttgtccttgatgattttactgatattgtgatggttatttcaactaacataagaaggaatctattagataacaaacattcacagattgcctctgcttgctgggaattacatccagcagcttgaagagctgggtatattgaaaggaaaagggcgttttaaatgtataatctactcttccctttggcaccaatccgtgtagtgagacaacacttggctgggactcgggatctggccctggcttccattctgccatgactttgagaggaaactcaagttccgccttctccaggaagttatccctgaccaccccagcctacggtggattttcctgcactgaatgtgttacacttagattccatggtatatgatttaacacatggcctctcatatgaaataacatatgaaatgttatttcaacattttatatcttgtctctccagaaacgttacatgctccttgagggaagaaatcaagtctaacctgccttttgaaccctctatgtagtgctataaaataaatatgtcctcaaccaagtcctgattgactaagaaaaccagtgattggtcaatgatgttactttgtcttctgctaaacatttttggggcaggggatagaggggtgtgggagaatgggagttcaactcagaggaaacttagtaaagaggaaaagacataacagacctggtattgagtccccatctggccaattaatcaccaagttatcaaataaagcctatttgatctcttcgacctcattttcctcatctttgaaatatcttcctcttagcatgattttgaggatcaaatagagataatatatggaaaattctttgtatgcaggagcccactttgtaatgttattcattgcttcaattttcaatttggcttgggttaagaaaaaaagtatttttttttctctcaaaccagtgagcgggggaagaatgataaaaatcacattttctgaaattactctagcttatgtaagaagtttgatctgccagtatttgcctttttctcacatcacctgctgcatgccacacacctgatttgtctgttgtgttcatgtaggattttgtagctcacaaaagcattttcacatgcattatcatacaaaaaccctgtgatacaggcactgtggaagtaagtattcccatttcattgatgagtaaactgagactcacagaggctttaaaaatgccccaacatcaccctatcaggctgacagtgcctgccttcctccagccttgtcctctttccacaacaccacactggttctcctgtacaaatattaggcagctcccacaagacattctcagtcacaaacatgatcaccatctacttcctagtcaaggagatcagttcacgcattttgtcttcatacaaataattaaaacagggactgggtaccttggcccatgcctgtaatcccaacactttgggagttcaaggcggggagatcacttgagcccagggatttgagaccagcctgggcaacatggtgaaaccttttctctacagaaaaaacacacaaaaattgctgggtttagtggtggcacttatggtcccagctacccgggaggctaaggtgggaggatcacccaagcccagtaggtcaaggttgcagtgagctgtgattgtgccacagcactcctgcctgggtgacagcatgagaccctgtctcaaaataataataataattaaaacattcaagcaagatcccattcagtttataagtcattaataattcataataaatgtaaacattgtaagcctggcctttctgtatttagcagtatagcaaaatggttaagaattagatggacctggccgggtgctgtggctcacgcctgtaatcccagcactttgggaggccgaggcaggcagatcatgaggtcaggagttcaagaccagcctggccaacacggtgaaaccccatctctactaaaaatacaaaaattagctgggcatggtggtgcatgcctgtaatcccagctactccggaggctgagtcaggagaattgcttgaaccgggactcgggaggcagaggtagcagtgagccaagattgcgccactgcactccagcctgagctacagagcgagactccatctcaaaaaaaaaaaaaaaaaaaaaaaaaaaaagaattagatggacctgatcctaatgctcgttctgatgctcagatcaaggggaaaatgaggaggctttttaggcctcggtaaatcagagttaacaacacccagttaacaagcccagtgtcacagtgagagtgaaatgagataatgcatatatagcactttctcctccatgtgactcatagataaaagctgttgatatttcaactgttctgggctatggaaattttaaaagatttcatgtctaggtgacacgtgaaagtccagcacgtggaccataaatgttgtcatggtttgacagtattaatgaaacacttcatcgtgtgtcagccagcctcaccttgacaggtcatctctggctggcgtaacccaagggccaatgtgaaaaggacatttcactgaggacatgatggggttgccttgtttttcttgcttcttaaagagccatttcaattaatttttttcacacataatcctgaccccttggcctcccagtagaatgctatacgtgcacaacaggaattttggcgtttattgtttatcctctgggggaatgtggtcccccttttactgcctttttcagcccactccccccagttgaatttttctgagaggcagtggaagggaaagtatatacccccatagttgtatttttttatccttattcacgattctcaacagctttttaaaagtgatggctggcagccaggtacagtggctcatgcctgtaatcccagcactttgggaggctgaggcagaaagatcatgaggtcagcagttccagactggcctggccaacatggtgaaacctcgtctctactaaaaatacgaaaattagccaggcgtggtggcaggcgcctgtaatcccagttacttgggaggctgaggcaggagaatcacttgaacccaggaggtggaggttgcagtgagcccagactgcgccattgcactccagcctgggtgacagagcgaggctccgtctcaaaaaaaaaaaaaaaaaaaaaaagtgatggctgggggcctatagtctataatctgagctgacctatatccatggcacatgtgttaaaggtggaaccatagtaggtcaggacagccatgtaaggtgtaggtgataatatcctgactttggaaatgaagaaatggatgcttaaatggctaagtaattatttaaggccacatgggtaagaaagggcagagctaggatttgaactctggtttatttgattccaaagcccttgctcttggatgctgtgacttagagattttcaaatgccactttcttaaaaaggggtcttctagaaataaaaacttttaagaaaaggtgaactttcaatggtggaaatgtgtgtattgtggcagtccagtcaggaaatggtgtgttatttttgagaagcaaaaccttttggtggttctcgactgttctccaaagacgcaatgtgcactgggcctccacgtagggaactccctttgctgagtctttaaaggaacctactggctgatgatgattattattaataaagtctaatatccagagagcaggattctttcccatgaacaggaccatggaaagcctggagttgggggaggcctagggagtcaacaatacaaaggaggcagtaggttcatggagagcgctgtgtgggggcacagtgaggaattgctacggggagcctaaagcagcattgtccagtggaaccacatacgtcatcttcagtttttaagagctacattttaaaaagtaaaaatgaatgaaagtaattttaataagctatttttaacccaaagatccaaaatattttcattttaatgtgtaataaatataaaaatatgaatgagatattttactcttttttttttctttggtactaagtctttgaaatccagagtgtattttacacttaccacacatctcagtttgagcccaccacattcaaatgctcaaaagcaggcacgtgtggctagttgctaccatactggaccatgtaggtctaatggtaacaatggcactgcagcctccttgacccagcaacactcactctcctccaccccacttcattttcctgcatacacttaacacctgccagactatatatttcctttatttgtttatagtctacctcccagtattatttagggttcagtctaagttggtgtaataaatggatggatgggtggatggatggatggagaatggcttaatcaaggtagaaatggatttccctccagtctagaggaggctctccatagctggaagggtatctctgttcccagtgttcacattaacatccagcctcagtctatcttatccctctgccagcctcaacctgtagtgtttaccttgttctggatgacttcttcagcatttctcttcatggccacactccagtcagggagatacccctttttttttttttttttttttttttttttttttttttttgctcagccctatcttctttcttttcttctttcccttcccttccttcctgtctcctctctttctttccctgtccctcccttccttcctttcttccttcctccctccctcctcctcccctgctttcctcctttcctccttccttccttccttccttccttccatcctcctgtttctttattttggtaaggacctgacccagaggtggtacaccttgatcagaaggtaaacacctccttgatcagaacatagtcacatgaccatatctagctgtggtctccagctggtggtcagttaatgtaaggagttctactattaaaattgggagagaagagcagatcttgatggacaactagaagtctccaccactgtccctcccccggaatgtaaactgccatgagggcagggattttgggatgttttgttcaatgtagtagacccagcagtggtgtaccaagggctgggcagtgggaatatgcaccctggcggggaagagtattttaaacaacattgtttgaattgccggtgcataacggtaataaaagtggactaacataattggtctcattattgtttttatattatccacagagtctgcatccaatattggctgcaccagagcagactgctctgttgcccagcccttggtacaccactgagccctggcacctaaaatagtggctactcatagcaagcactcagtatctgcagaatgaaccaatagatctacctctgcctcttttccttccatttcttcctgacttctacccttggagaggcagccctcaccaggtagtagaccttatggcatttcattatggttagctacttcttcctctttaaactgtgagctctttgagcaccagaacctgcaccagctgccacaacctggccaccaaccaggtgctcaattagtgctagttgaaggaaccagtaaaattcattgaaggctgctccccttagcctcacttagcctgcatttagttgactccaagcaggaattttctatctgattctctttgttttgtctgaacccgagatgttgaggctggaaatacagtcaagatccaatttgtgagctagcttatgagtcaggttaaggaatttacactgtatcctaaaaacagtaggagtcatcaatgcaatttaaccaggtggaactttcattaaaatgtaactatgtgatgtgaggatggggaagaaggaactaattggccctttctcttcagacctcttgacttcagctttctggggactggcatttccactgttcttccatcatttctgagggtatcattggtttaccctctcaatccaaatgttcctctgtggttccccattttgatgtttaatctttgaggcatccacttatgtattcatcgatccttcagcagtcatgtactggaaacccttaggatgcatgctctgtaagacagggcgttctgccttgtccactgctgtggccccaagagtgggaggagtgggctgtcagtaggccaccaataaatatctgtgttctggctgacccccatatgctaggatactggagatgaggaactggagaaggtgcttaaagagcacatctgtctggtagaggacacagagctgtccttcaagcatttgaacgatgttctcatttccctggaatcttctcctctccaggctcacatctctagctccttcaatgattcctcttgcgacatcattttagttctcttccccaacctagtctttttgcttttaatgaatgatcactgatgtatagccctgatgacatctggtgtccacagtggtgcctgatgctccgggtgaagttgaagtttgaccagtaagagggaagaaagaatggctcctccctcatttcagagaatacatcctagtcacaagtgcccctaatgtcactcaggtttttgatagctacattccctcactgatccagtagaatacactaccaactgatgcaccatcttgattaacaacagcaagcctccccttccttcctcagtatctctcctcacatggtctcccatccagatttgctttaagcctgccactctggaagggacaccagagatcatttaaataaaacacattatagaactggttaataggctacctctatgtctctgcaaatattccaagcatagtttggtgagtataatcaaagaccaaaacaatgtttgatcctcatggagggacactatgtcttgttatactattgtaagttcccggggttttattcattttggcatttagtggatttgtctttgacatgttggatttaaggacatcattattcttggaatttagaaaagaacactgtgcctggcatgacatgaagccaacttagaaaacccaaatttgaatcccatttttgccacttaactagctgtgtgatcttgggaaagttggttaatctcataaaacctcagtgttttcatctaataaagaatactaatataaacatagaatggacagaaaaagtgctaaaaatgtacaaacagttcatgtaataactagtacaaaagttttacaaaggtgaacatatgaaaaagatgtttaactttactaaggataaaaaacgaggtatgatcttaaagtgattttacctagcaggtactttaacaggcacttgtaggcattgagtgcagaaaaatagatactcttccccattgatggtagaaatataagtcataacagttttcttaaaagatatttataaattcatgtaaaaaccctgaaaatgtgcataccttttaccccaaaataattccacttattgttttgagcctagaaaaataatcatagcagtatataaggatctatctacaaggatgtttatctcaacatttttataaataatgataagttgaatataatggtaactgtgtaattgtggtcactaaaagtaatattttagaagaatacttcataatgtggaaaatacatattacattaaaaagaaaaaactatgtctagtataattccaatttgcaaaaataatttgtgtgtttatatgtatgtgtacagaatatatgctacatattaaccttaattatctgtggtttgtggatgtagatgattttaattcccttctttgtgcttctattcttcaaaattaccacaacaagtattatttttaaaagggtggaatgagaatgccctggggtatcttataagaatgtgatgaaagtctaaatttaaattataaattaaatcatgcacatttattgtattattgttagatattagactgatctcaagctttgcctttctttttctcccttcttccctttctccttccctctctgtctccatctgcccctttttcttttcttcactgtctattctctcctttccttctaggcccggttttttcctgctccttccatggggagcattgctcagctgcccctaggattcagagtcaaatagtttgctgaccctggtctgaagctcatttgaccaaactgagcaagaagtgcacaagtttcttgcatttccttccagacctctagtagccctgacacacatcctggactaatcaagactatgtgaaacgtacgtccatcagttcagagttgagctcttgtcatataggagcaaattaccaacttctcaaaaactgccaggggtgggaaggggttctttccttctgcatcccaagtgctggatgcctctgccttccaacactactcgaaaatagctttgtcaaacaaagcatgaacactaggagtttctgacattttcataactatgagcatatgatttgcagttcatattgaataacgatgtaagaaatctgccaagaaagctccaaatactatttccagcactggttcataaccagttacagctgcctcaccacagaatgtgagcacaatagactaccatgttccatggtctcttgcttgcaaagtttgtattgagttactaggagtcattctaatgggggaagtcactctcctggaaagcatttaagatgaataaagtgaagggtttaatgttctaatgaaaaaatttgtcaatatattaatcaaatgtgtgaacactaaacgtttttacgtatgtttgctgtagaggttttaaggcgggctttggctttccagactcaaataaagtagatagatgcactgttaaactttcgaacaatgacaaagaaaaacatggggtaattgcttcactcaaagcctgccaggagattaattgcctaagagatgtattttgtgcagtatccaaaaactgcagaatctacaggagtgtcttgctttcactaggagaaaacgtatgtcacctctcaccaaagatgtttatgtcttttcacaaacctgtctttttgcagtctaaaaacattccaactggaaatgactacaaagctgggagttgataggttaggggtgtttagtaaagcttcaaatactctcatggagtcagatacgattccgtactacgagccccacataacagcaacctgggcccagggattgtgaagccttttcatttctggttaatcagtgggagaggtggggagccatgagcctgccttggacccgccagccccgaaactaaaagactaaagttgcagggcttatggggagttcgcctagtgcacttaagaaatagggatggaacttgccttgttccacctttgggattgtattcaaatgagggcttgctaaaggctgaaggtgttggaatctgtaggaggtctgtgtagccatagcagagaaacatagagtgcgcttttataaacatttatttggtgccttctacaaaccaagttatatgtactagactctgctgggagtgagactggggttgcattactactacatggaaaagtaagaacagttgctgtatttctggaacattctgcctggtagaggaacagacttctcaacaaataataattatacagtgaaggatgctagagagaacatattttctcatgaactaatctgaaagtttcaggaaagcatcttaaaggagataagactgaaccgaaactggaaggatgagggacagagagccaggtgaagaaaaatgagaatggatttcctggaagggaaatagccaaggcacaaacatcagtgccagtgtgatatgttcagaaactataagctgttctttaataccaggacctgagaaccaagaggggcaatgcaggagactgggctgaagatgtccatggggcagttatatagggaccttgtgattgctgttaatgtgctaggactgttgccagtggactttatacaatagagagtcactgaacatttgtgagaaagagataatgcaatctacctattagctcatcattctatggcaacaggaaagatcaatttacaggccaagaatggaggtagagagaccagttaggagactcctgcagccatcttggtgggatattttgagagcttacactagagtaaccataaaaggttagaattggaaagaacatattatacagttcaacttccatattatacaaatggagtaagtgaggacaaagaaggtaagtgacctatccaaggttgtatggaaataaccttgttggcagccaaagtgggaccaagaccctggtcttctcatttccagtccggtgacttttccactcagcaatgccaagttcagtcccagcatcatgcttcagttagggaatgccctagagaaacttgaaatgtacttggctggcatttttcctggccatatctaggaagtgagaacagtccttgttggatggagggaccttgaatccagccaggctgcctgggagggatctttttctgttcattatctttctggctttaggtacctcccacatcttccaccctcttcttctcctctaaaaatccttcttcagccattgcttacaaattctctcccttctgctgagtctaggcagtgtagaacaaaacctagcaccttttttcaagtttgtttcctcaatattttaacctaactattgtatcactgttaagcacttgggcaattttgaggatgaataatccaataaaatcgaactgtttccatctaaactccttccacactttacatggcggtgttatttgtgcaaatactgttttgtgttgtctctttttcactaaatcatatatgtacacatttcaaagctcttggctttattatatatttcttataatggacactgcaagaaatttggagcaagacctaagcttttgggaaagagacttaatctctggacctaattcttcaactataaaatggagataatgctacctaccttgaggggttcctggtacaaggtaggcgtatagtaagctttcatctctctctctttctctgtctctctctgtctctctcctctttctctttcctctgtgtgtgtctgtctctttctctgtctcctctctctgtctctctctctctctgtctctctctctctctgtctctctctcctctttctctctttgtctttccgctgtgtgtgtctgtctctttctctgtctcctctctcttggttgcttctggtttggggcaatgtagtattttcataaacatgtatgatcacaaattatatccatgctgaaattcaaaggtaatttttttgatgtctacctcgaggcctagaatactgttgagcatagaataaaatctcaatagggcataatggtaggaagaagaaatgaagaggagaaaaagaataaaccatcttaacttgaaaaccaaattagctgagatgctcgtgagcttccaatctcatacaggcattctaataacaagtattcacttactgtggacccaagaacggccagatggcttgtgaagaacatcagcctcagcaatcacacagatttccaccttagatggccttttgcagcctttggaggatggattggaagagtggaaggttggaggcagggctctcagtgaggggcagctgacaggtggtgggacctgagccatgagggaagaaagtggtcaaattcaagaattcctttggaagcaaatttagttttcaaggttgctactcttagaagctgcccctcttcctcttctcattatttcttccatttagcaaaactaaatgcatggggaggccaggtatggtggctcatgcctgtaatctcagcacttagggagatcaaggtgggaggattgcttgagtccaggagttcaagaccagcctgggcaacatagcaagaccctgtctctacaaaaaaaaaaaaaaaaaaagtaaaaaaactagccaagcatggtggcacaagcctgtagttacagctactcaggaggctaaggcaggagaatcacttaagcctggaagtttgaggctgcagtgagctgtggtctcaccaccgcactccagcctaggtgacagagtgagatcctgtctcaaaaaataaagaaaaatgcatggagaggttgggtggctggggtggggaagtagagagattgactacacatttcagattgctagaggatgccaccacacagaaattaaaataaaaagtgggagagatttaattcacttattgaacgtttatttattaagtatcaacaacttgacactgaataggcactattctggccattagggacatagtagtgaccaaagcaaagttcctagtcccatgaagtttgtttataaacaataaacaattgaatatatcaatacagagtatgcctgatgagactaaatattaacacaagaggtaataatcaagtaagtgtcggggggaagtggcagggcatgaggtcagagaggcaaggtgaggcaggagaagatgatgtaaggatattgtaaagatgccagttttacttagcatgacaagggaagcctttaggaagattgaaacagaggaggaacaggacaaatctgtgcattacaaattaatcattattttaatgtgaattgctgcttctgccattataaaaatttgtaagattctacctgtgacatgggcatctctgtattgcctttgggtgggtgctggagttgagggtacagagaggcattaaactcaccattgctttttacggaggccagtagtctttttttaaccaccatcagcagaaggaatgggaaacaaagctgagatgagacagaaaagcaagaattggggattgggtttcaccccacttctgagtagtaagatgaaattaaaacccttctaagatgtccctgaattccatttaccactctttccacaaaccttctctttttcaatccatgcccaaaggcataaaaggaaagaaaaaaaaaatcaaagcaattccagtaacacttgtggtagaaaatctgcctagattggtatgtgtgaatttcatattattctaaagtcccattattcttaataggcaattttagggggtggtttgaatgcctgatatttggagaactttcaaagcacatccaaggggtctctaataagaacttgggggcgctgaactcggggactccaagtgtcacctatgcatttccagcttcagcctaaccttgggggcaaagcaggcccttaacagaggaaaagtaaaaacaaccaaagcattcttagaggtgcaaggccgccctatcatgaaaacctcagtaaattgaagacagtaaaaaatcactcattcttttgattagcagtcttctgtattcttgcaaatactgtactagtgcagtcctatcatttcaaatgtgtgtttaaataggaataaaatatattacacacataattttccctcaaattacgtttgtgagatacaagcctgggtaattctgctcctgttccaagtgaaatgcaaacccttgtgtttccaaacatcactatgaagcaaagccaataccttcccttttctgagttggacacaagtaactcttccgtgctgctctggaaactatgacagaacgttattcatctgtttgttttaatagccaagggaaaaaaacttcaaaattttgatttaattttttaaagaaaaaaaggtggtatgaaacaggtcgagggactctttagctaagcgaataaatgttaaccaaattgtcactgaccagatgtgggaaccagcatgtgatattcgacacagtcacctcaaaattgcttatgcttacaaaggcattccaataaaagaaaaagggatgtaagggttagctgaattctcaaccctatagatttaaggcttctctgtgagtcgttggccctctgggttgacatgccttgattggctccctttcaaaactgaccttaaaggtcaagtatgttaacatgtactttttgatgctcactttcagaccggtctttagaaagcagagtttgtgagataacttcaggatcacatatttaacctgtaatctcttgaccacagccagcctgaggtgaagtctgcttttggtgctcccgacagctccccttcctggatcctcaccctccccagccatccctttccttgtctctgcctatacctgtccagagatgctccctctcccagggccatcatttcaaggtgtgtgcagctagggctgataagatttaagtgatgccccctcctcctggttagcagttaactaaggttgcttccaggcttgaagtctcctccagaagaggaaggaggtaggttggaataggaggtaacttttcagaccacctccaattataatctgttcttaaagtttctatgtctctgatcttctgtctacattggaataattctgcatcttttacttggatccttaattttataatgtagccccatttttattaaaagccagggctaattttaccttgagagatctgtttgcccctcccaagggagaagaacgctgcctctgaagtgggaagcttcacactcagctcgaggttactagagccattatgtggccatgcttttaaccagatctgctaataggtggcccgattcacaagttttaaaaagggatgttttccatttattcatggccatgatggtcttttgggaaagcattagtaagttgtgtttgcttgggtaaagagaaattgctatccatatgacagaaaataactcccactttaataaactgctcactgagcaaacctatggaccgtccatctctttgagctgtgtgatgactttccttcaagggttttaggggcagccatcttgatgtgatttcctctccatggctcaaaacagggtgtatgaaaggggctggggggataaattcagaggtcagaggtgttgggctatttatttcactgctctctgtccctatgaggctgccatgctgtgggattgccaagtcactgtccccggcattccatttgaagagccatgagaatcagaacaaaagaacctgctgatactgagtaaactgctcatgcttatatcagtttagtctgcttggaagtgacttacaaagctacccccacgacctcccccaccttgaggcctgaatttgcaaccattggccctctcccaaggtccctctaccttggcccttgtgtaaatgatattttttttttaattaaggtggaattcacataacatagagttcaccattttattttattatttattttgttatcgttatgttttaaagagatggtcttgctctgtcacccaggctggagtgcagtgatgtgatcatggctaactacagcctcaaactcctggactcaagcaatcctcctgcctcagccccctgaatagataggactacatgtgtgtgccaccatgccctgctaattttttcatttttaattttgtagacacagagtctcactatgttgtccgggctggtcttgaactccaggcctcaagcaatcctcccaaccttgatctcctaaagtgcggggattataggcatgagccactgcacccagccagaattaaccatattaaaatgaataagtcaatagtagttagtatattcataatgttgtataaccgccacatctgtctacttccaaaacattttcatcatcccaaaataaaattccttgcccgctaagcagttacttcttattcctccctgtccccagcccctagcaaccaccgatctgcttttctctaaagacttacctattttaaatatttcatataaatgggatcatacaatatgtgccctttttgttcagcttatttcacttagcatgtttttgaggctctcccacatcgtaacctgtttcagtacctcattcatttttcatggctgaataatatagtctattgtatgtatctaccaccttttgtctatccattcatctgttgatgaacacctgagttgttcccacctttggactattgtgaatagtgctgctctgcacatttgtgtacaagtgtgtgtttgagtacctgttttcaattctttggtttaagtgagattttacagtcaggaaagtccctctgcatccattctcttctcattaagaagaggtaggagacccggcgtggtggctcacacctgtaatcctagcactttgggaagccaaggcaggtggatcatctgaggtcaggagttcaagaccagcctggccaacatggtgaaaccctgtctctactaaaaatacaaaaattagccaggcatggtagcacacgcctctaatcccagctactcaggaggctgaggaaggagaatcgcttgaacccaggaggtggaggtttcagtgagctgagatcgcgccactgcactccagcctgcgcaatgggagcgagactccatctcaaaaaaaaaaaaaaaaaaaaaaaagagagagagataggcattttaactgaaattatccccaaaaagaatattttaggaccaaatttgtcagtaccgatcggttcagctatgtctgcccatgccctgtatattctgatgaggaagaaaatcgcttccaattagaggatactcctggtatggagaagggtccactttggtgggctaccctgggatagtctcctcatctcttctagttctattggcctgtcagtggtaaggtgggcgctaaacagataaaatagtatatgaaactggaaatctgtggaatggtttgatgaaagtactgggaatgggtggggttagtgagtgactaactttccagggaaggtaggggcatttgggtctgaaagatgagaacattcacaaggagaacgagggggtggagggcatgccagccctaaggatgagcatgggtcaagccatgtccgcatcgaagtgcatcctgtggtttgagactagcaagatcatccacatgactaataccatcaggcttgtaggcttgtctggcagggaaggaagctggaaaaactggcaagaactagattatgaagtctctgcagaacagcatttcctttccttgctctgcagtggttcctagatgggcactccttttgctgccgcactgttccacgatccctcttagcactcttcaaatatccttcataagctccttgccctggagaaggaggagaccctggaggtggattacagaccacatttgcgtttcccaatcccatggcagagaatatggcaggttgtagaggctggcaacatggtaactcaattacctttatgagaaacatgagctcccatcacaaagcacccctgcaccttgacatcatggtgaggcagcggcgcacgctggtgccagccactgtgatgaatggccaaattccatttgccctttcacaatgcacttttcttctccattgaatgcagccttgggcacgctcactgcaagtgcccttgcacttttgctaccttgccacttgcttcatgtttttaatttgctgagcatggagtaaggcaggaagacatcaatgatgaaagaagtgtgagctggaaaaaagcataaagctgattaatgctggaggagcatttgttcccctccagccaaagccagtggggaaaaatggaaaagaaagaaatgtgtttttgactttatgtttaaaagaaaaccttttaccacccagaatgcaccaaagcttctccacagcagaaagcccctctaagcagtgcaaaaactccattgccaagccacttggaaagaagttatagagtgtggttagaaacactatttagagcaaatctagctcttctacttgctgcgtaactttggataagttctctatgctttctgagtctcacttttctcatctgtagaacaggaataattacatctttacctttttttataagattgttgttgggataaaatgacttagtatctgttttgtaagtatataaaacttagcagtatctgatacagaatcaagactcgttataaggtctctttctcgagtaggctgatttaactaagagtagtattgaaacgcagaacatagttacagatctaacaacatgggatagtggcctcatcttgagtttcagtttaaatcctagctccaccacagactgactttgtgaatttgagcaagttacttaacttctctgaatttgagtttctctctcgtaaaataaggataatagctcatcaggggctgctttgaagaaagcacctaacacagtacccagcccagagcagcagacacttaatacatgtttggtttttttcagtgttgtggttctcaaccacattcaaatcacctgataggtttctttaagcatagatacctaagcctcatccccagagactatgatttaataggtctaaggtggggcctgggcattcgtatttcctaaagcttctcaaggagattctttcattcttttttttttttttttttgagatggagtctcactctgtcacccaggctggagtgaagtggcatgatcttggctcactgcaacctccacctcctgggttcaagtgattctcctacctcagccccctgactagctgggattacaggcacctgccaccacacccaactaatttttgtatttttagtagagatggggtttcaccatgttgactaggctggtcttgaactcctgacctcagatgatccacccgtctcggcctcccagtgtgctgccaaggcgattctcataaggagccaagacagaaccactccccagcagataacagtacatactggttttggggtttttttgtgttcttttttaaaaaatctgtctcccaggagactgaacaggatagtaggaattctgggaatagtcaaaaatttaatacacctgcagttctaagcctttgataagaaatgtgcagccaaggaattgcattccattttattctgaaaaaaagtattcaaagagtctttttaagagtcttgaactggaaaggtggtaagaagtttagcctaagcctcacacataaaatatgggaactcccagtaggttggggatttatatctgggggtaattccagggttttgtcctcccaagagatataaattgaagccttgagagtttaatgtgggggagaaagaagtgttctcataatgacaccttaaaaatccagggctctgctaatgcctagggatagaaaagcatcatctgtaatagcaggggggtggcatgggggtgtattctggtctctgtacttaggtttccaagatccaagtgtgggtcatcaagaaccttctttctccccataggtttatggtattagttacccaataaaagttgggttaattttacaacccaagtaaaatttaagccaaaaaggcttcagcattactctaggatttatgaaagtaaacatgtggagtgcttgcaggattgtgcaacagtaaaatttcaatgtctttatgtcaggtatatgatatattcatttgtatgtgtatttaaaggttaagtttttaagagctttgcaacacaaactattttcagtactaaactgaagatacttcccccactttcacctttaaaatgattcttttaatgaatgggagtagagagaagcagaaaattagtgtcctatcaggtgatttttccacttggtttgctcctatactttgactttctagactcctacgctagaccttcaagctgggaagtgagcaccacagcactaaccgcagtgcctcttacgatgtgggagcttagtaaataactgtcttttaaataaatgtccctttggtcattgtaaatactttaagaatagccatatattatctctacaatttaaaaaagcttttacattatctgatgggatcataatgactttcccatgtagggcagagaagtcagttactgtgtccaacttgtagatgagaaaattgtggctcagagggctcagacagcttgcctaaggatgcccaaatgttaaactcaggaagagaattttgttctcctgactttgctctgagggatttttacttagaagaaaccaaaggggaaaaacggtgtatttttttttttttttttgagatgatatattgaggaggagcatccagggttgaagtcaacttatacacgtggcaggcagactttggtttggctatggtctgcctttgagaaacagctggatgttctgcactcgagggatcttgtgctcatcgtaggccctcgtgggagatggtagcctctgccctttcaggttgagcctgccatcttgggtcttcatctccagccttagatctccagtccttttacctggcacatgaatcatgtcatttctggtgtccctctgtcttcaagatgaaatctattacccctccttataaaaaaagtcttataattttgaggccgcaaaattttaataagactatttttttaaattgtagagaagcatgaaagcaaactttccatggacattttctctagatttccttggatttagtgactcaattcaaactctccagactatggtttgccctggtcctctttgggcagggtagagataatggaggttcagcagtgaagagtcacctaactgggctaccctcgggtttctttccagctgcacccagcttctcaccccatggatccccctaattgacgtgtcagttggagtggatctgttcgcccacgcctttgtagcaaatgaagcagaaataatctgtgcttaaaaaacaaaaaactgtagaacatgtgcccagatttccaactcatttcctctttactcctataactacatcatcttccagcccaccaccagctgcgaaaataaaagcattttctcccatatttaaggatgattttgtgcttcaggatgactttctgggggtgtaggaaacttgaccaatgtgaccaacagatgttttaagaactgagcaaaagcccaattccttagcccagtcttttgtatattgtgcccaactgtgccccctagtgactatttagggtatcgcgcagtcagagcttgctgtgccctgtatgtatgtggtgcatcagctaatgtctgtctatgctttctttcagagatgagtatgaagaagatggattctgtcagccatacagagggattgcatgtgcaagatttattggcaaccgcaccgtctatatggagtctttgcacatgcaaggggaaatagaaaatcagatcacaggtaggtagcaccaatgaaattatatttgtcccttgaataactatttttctcgccaaaagttttattgagctcctctcttgacaaaggattaagctcagcatggaggttgggagcaggaccataaaaaagcatgagacatgatctctgtgctctggaatttacattaaagtaatttattgaaggttgctcttagaggaaaaggaagctttgtgaaatctcacattcattcaaacactcaataaatattattaagtgctttcaccgtaccaggaactgaatctgaatgggagaggtgatggtgtgtaaataagccaggtacgtctctgccctcacagagcttactgtttagaagcaacatgatgtcgactgagaggggatgaatttagagtttagagttctggacactcatcccagaactattatgacagtgaactttggggaaatcgcttactttcccaaaaagtccccttcttcatctgtgaaatgagtgatgaagcaagatgaccattggtctcttcttgctctagctttcaatatttcactcttcatttttcttaattgaaagtatccttttgatagaaatctaatagcgaagcacttactagcacacatgagttaaagtagcataggctgcctcataggattttgcacgcatcgttctggtggttacagcagctttgtccccttccattagtgtagttatgatgcctctgtgtcacgtatcctttgcaatccattcacattgtcttcatgacattctaatgaggttgccatatctagcaaataaaaattcaggatacccagtaacatttgaatttcagataaacaacgaataattttttagtataagtatgtcataaatatttatctgaaattaaaatgtaaccgttgtctttttctttatctggcaaccctagggtctaggagaggtaagaacaaacccaaggcagaaacatagaacagcaaaaggcccagaagctatgtggaagctatgtgctatgaggaatgtgaaggaactgagaggaggctggggggaagagggaggaggactttttttttttttttttgagatggagtctcgctctgtcacccaggctggaatgcagtggcgcgatctcggctcactgcaagctctgcttcctaggttcatgccattctcctgcatcagcctcctggaggactttttaaccaaccaaaagaagcaactgtaggaataggtagttgccattttctgaagccctcatttcaacaggaagagaattctgaaatttcaaagagcagtaagactgacagggaggagctgttaaacacccatttcaacctaatgtaagaatgccttaatgtacttttaactgaatatccacaaaagcaagtagacattttgggccaggcacagtggctcactcctgtaatcccagcactttgggaagctgaggtgggcagatcacttgaggccaggagttcgagaccagcccggcctacatagcaaaaccacatctctactaaaaaacaatacaaatatcagctgggtgtggtggcacatgcctgtagtcccagctatgtgggaggctgaggcatgagaatcccttgaaactggaaggcagaagttgcactgagctgagagcgtaaccctgcactccagcctgggcgacagagtgagactgtctcaaaaaaaaaaaaaaaaaaaaaaaaaaagtggaagttttgatgtaaataattggtaacctatttataaaaatcctctcttggagatttctaatgggtatcagcctggtggaaagtttttttttaaattcatttacctttgtttatcccagcgtttcccaaacttgttggcttgtttctcaagcactattctatttcacatgattaatgttctgagcaacatacttggggaaataatgtatcagcaacctcctaggtttccttgtgaggtgtaagctccttgtcaatagcggtattcaaaggtaggctggtgcgctttttgtgcatcttaccctactagtaagagattaagctaaggaaccactaatattcgatgatacacattggaacaattgtactgtgctctttgagaacttccaagtgagttgcctcattttcagaagatggagtagaaagtattccagccacaaagaaattaagcaagttaccctaagtcatccagcaactcttgccgtccagcaagacacagaactggatcctgtgctcaggctcagccactgcggaaacaagttctgtccctacagctgtcaaatgttttagaagcctcacaaaactaataaaaagcaccagatgaaacacaaagttcgattgctttgtagtaaaaaatgaaaaatatattgtactttaacttaattaatttttttattaggaaatggtacatatgtaatttaatcctgttttattaactttgtagtcaaaatggtttttttcaagccagtgaaagtaagctgcttagacatctgaaatgaatctccttctctgggccttgtctgtttcagcacggcggattccttgcaatgtgtgtttatatctgatatccgttgactagataaccaaagaagataaaccctggcctctgggagttaataattgtgtttgttttccagctgccttcactatgattggcacttccagtcacttatctgataagtgttctcagttcgccattccttccctgtgccactatgccttcccgtactgcgatgaaacttcatccgtcccaaagccccgtgacttgtgtcgcgatgaatgtgaaatcctggagaatgtcctgtgtcaaacagagtacatttttgcaagatcaaatcccatgattctgatgaggctgaaactgccaaactgtgaagatctcccccagccagagagcccagaagctgcgaactgtatccggattggaattcccatggcagatcctataaataaaagtaagtggtagcccctgaccttctgtgctcttctaagggtcagcaacctgttggcacagggaaaactggaccttgacccatagtgattttcatactgttaatcaaattattttccaatgggctgagtactgtgcctgagcattcagtggtggattagacatagttatcttcaagaagcttcatgaagacaataattttaaaatattggagctggtttctcaataacttaaacatagaattactatatgacctagcaattctactcctgagtatgtaatcaaaagaactgaaaacagatgttcaaacaaaaactcatatgagaatgtttataacaacactatttacaatagccaaaaggtggaaatgacccaaatgccatcagtagaggagcggttaaacaaattgtggtatatccagacagtgaaacattatttatccataaaaaggaatgaaatacagatacgtgctacaaacctggatgaacctggaaaacattatactaagtaaaagaagccagacaccattgtatgatccatttatatgaaatttccagaatagataaatccatatagacagaattcagattagcggttaccaggggccaggctaggggtagtggagagtgattgtttaatagatatggggtttcctcttagggtaatataagtgttctagaacctatagtggtgaaggttgtacaatattgtgaaagaactaaataaatgcactaatggtacatgtaatggtaagtgtattatagcatgtatcagtacattctcacattgctataaagaaatacctgagacagggtaattgataaaaaaaggaagttcaattggctcacgtgtggttctgcaggctgtacagggagtatagcagcttctgcagaaggtgaacggagagcaagcttcttacatggcaggagcaagagagtgagtggggaagtgccacatgcttttaaacggccatgagaatgagaacttactatcccaaggacagtaccacggggggtttgtgctaaaccattcacaagaaccctgcttccgtgatccagtcacctcccaccaggccccacctccaaccctggggattgcaattcaacatgagatttggtggggacacagacccaaaccatatcataccgccattttaaagatatagatgggtttgcctccatcccctaccccatcagcagcaccacgcaaaagactatttcagtgtacatttccctttcatctagaattaatctcaccggcaatttttcagtttccttttgatcgttaatactattttgtgagttaagtaaatgagtgcatctaaaatgcttaacacatggtaagggctcagtagcaacattattattattgtcattactcctccaaactccagttcagttcgactgtgtagattctgcagtgcttttaagcccctctggccacgtgcgaggtcttcttaatgggatctgcttctcaagggtgccgaccccatcagcacagagatagcccccacttttgttagaaacccagaatgcacagcctctgataagcatgttctgtgaattacaataccaactagattccttattacatgatttcatgtctaaggctgtcagtcagaatggaaggaaaagtttggcttgaaccttccttgaaccattcactaggaaattacttctgtgcccccaggtcccaccccagttccgatttcttctgtgttcaatgttagaaatacttttggaagactgattttattcctgaagcaaaagctttaaatcctcccaggaatgtaactgcaaggcaggccctgggtccaagcccagcaaagcagggagactgtcctgcatggcccctgaccagcagggaagctgtggccacgaggttaattacctgccctcccctccagaaactgctggctagaggagagctccagcatctcctatgtttctttctaattgtttgggtttttgtgtgtttttcagatcacaagtgttataacagcacaggtgtggactaccgggggaccgtcagtgtgaccaaatcagggcgccagtgccagccatggaattcccagtatccccacacacacactttcaccgcccttcgtttcccagagctgaatggaggccattcctactgccgcaacccagggaatcaaaaggaagctccctggtgcttcaccttggatgaaaactttaagtctgatctgtgtgacatcccagcgtgcggtaaatagaagtcattgcccctaatgtattcaatcatctttaaagatccctatcctacccctcttatttaggagaatcctataaggggggcaaagaaaatggacagtatttgcttgatctcaatctggttttagggtaaaccttgccgtttctacataaaacacctcgtaaggtaccaaaacacgttctcaagaagtcaactgcctttatacctgcagccattgcactcatggatgtaacagggacccagcccttcagaggcacagttgagacagtttatcacattgatttttatagaaaaagatgttacccagaatggtctgcgtccaagtggaccttttcagcaaaaaaaggaatattggaagcaggaagaaattgttttctgtatgccttaagaacaccacaaggcaggatgaatctacaaccattactcggtcatccaggacaatctgtgggtaaactgtgtccttcgttatgtctgttaatactgcagaagaagcatataggtatctagtaagaaaatggaattcctgagtcagttaactgttcctttttctagaaaatgtttggagaaaataatgaaaatgggccaagcatggtggcttatacctgtaatcccaacactctaggaaggccgaggcaggaggatcatttgagcccaggggttcaagaccagcccaggcaacatagtgagactccatctctaccaaaaaaaagaaaaaaaaaaaaagaaaatgttggtgaaacctggagttaggaactattttggaactaattcatcttcctgatcctagttctcatagatatcatagataatgccaagtttcccaggcatagtgggagagtcaggatgtcactgctggaaaagcaaaagctacagggtaggagggtgggcaaacaagagcaatagtcatgggacccacaatacaaagtgagctcggtgtttaaccagatgattattcaagccattcattcagaatatttgttgagtacctactaagtgccaagtacttactcatccgagcatggggagacgccagggaccctaaggagggagtaggcatagcacatccacaaagaagcaaggagtcatggaggcggaacaagcaaaagggagagtagcagaagattaggtcgggaaagtaacaggacccaatcatgtaaagctgtgtaggccattggaggacttaagctttgacgctgaatgagttgggaaagcatgagagggttttgagcagaagggtgacatgacctgacttatatgtttgaaggctcacctgggctgctgggttgagactagcctgtgggaaggatgcaagagcaaaagcaaggagatcagttgggaagctactgcaggaatgcaggggagagataaagtggccttgacaggaggaggagtggaagacggagggacacgtgggcagattctggatatgtgttgaaattggagacaagaggagtcactgatggatcagatgtgggatataaatgatggaaggaatcaagagtgactccggagcttctccatggaattgccttttgctgagacggagaaaactataggaggaataaatttagtgggagctggaatcaagagtttttgttcatgctgagtttgagatgccttttagaaatccaaaaagagatactgaggaggcagttttatatcacagactgaagttcaagtcagggtctgggatgagatggatacgaaggaaatgttggcatacagatggcatgtaaggccatgacacctgaaggaaagaggagcatatctacttaacaaaagagaaggaaatgtcagtgcaagacaatgaaagctagctttagactctgggtcaggggcagtagcctcagttcctaatgtaataatgatctaactgagtggctaccatgtgccagatcctatgtgagacaccttacctctgtcacctcattcaatcttcatatccagcttctatcatcctcatgttatggataagaaaactgacactcagtaagaattaagaggtttgctcaaagacactcagctatcagtgactgaatcatgattttaactcaggtcagccggattcccaaacctgttggctctttccactaagcatactctctctctagagagcaaaatgaatctgcttaatggcaacaataacaggtaaacaataaatatatagtttgtagtaaaagcagtttattgtaataggtaaggacatgggttctcatgtttaagtgcctgggtttgaatcccaggtcttcaatgaaatagctgtgtgctcttagccccttctaatctcatttttcttatcagtaaaatgagaaaataatgatatacacttaggatttattgtgagaataaattagttgttaactgaaaaaccctatgatgtccgaacatagtaaatgttcagtacacattatctattattatatagtcaatatataaagataaatcgattcgaattatcacatagtcaacatatgtaaataaatgcttgctctcagctcagcaaatattgtttgagagcccaccatggagtagggaggttataagaggaataaaatgattcatgcttttgaggtatgtcagttacaatgcagtatgtatgatacaatagaagttagcacaaatgttatggaacaaagaaggggaagggcttaaaaaattactaaagaaatccataagaaaaagttttaaaaatattgaaaagaaccctagtgatgaaaatttgagagacccttattctataattttgttcctacctgttacttgttattatagtgactttacttgcaaaatggttttacggaaagttgaacacaacaaattttagaaagatcaccacaccccctttgtgttgccgggtttcatacaccttcatatgggctttaatatactttcatacgtattacaaagtaacctcttgcagagccattgttgatcatttcaaggaaaattattctgtattttgtaatggtttgcacttcatttatgacattttccgtgttattttcaacagtgataagaaaggaataaaaacaaaacatagatttacttagttgccccattccttctcctaaaccaggtaaggtatgagagtctgcaagagagtccaggataaaagcagtacttactaagcaccttccacgcaccaggcacagtgctagggttttcacatgctttctttatcctcatcctcatactctgacaggtattattaaccctatttttgctgatacagaagctgaggctgagaaagccccagggtcatccagctagtaaatggaaggtctgtctgattccaagctcatcttcttgctactcttctgtgctacttcgggttattggttgatgtacagaggaaaccaaatgaactggtttgttttgtttctttgttttttgagacaggatcttgctacgttgcccaggctggtctctaactcctgggcccaataaatctttctgccttggcctcctgagtacctgggactacaggcatgcaccaccatgcccagctttaaatgaattgttttaagaaagaaatgggctgggcttggtggctcacgcctgtaatctcagcactttgggaggccgtggcaggcagatcacttgaggtcaggagttcaagaccagcctggccaacatggtgaaaccccgtctctaccaaaaatacaaaaattagccaggtgtggtggcatgcacctgtaatcccagctagttgggaggctgaggcatgagaatcgcttgaacttgggaggcggaggttgcagtgagccgagatcgcaccactgcactccagcctgggcgatagagcgagactcagtctcaagaagaaaaaagaaagaaagaaaagaaaagcattatttgttccaccctaggtaaacactattgttctttgggtgacttctgacccttaatttccaaccaatgcctatcagaagtagggaagtaatttgtccagaagctggaagacatattgatactctgattcaaggactcaagctctattacgattagtttaagcaaggattacaaattatacctaaagtactcgttttcatttcgatgcccttcctgcagcatccagatcaaacccatgctaggagggatgaaagaaaccttcgaaaggtctttcagactgagtagaaagagggagatcacttacatctacaggatacctactatgtgcctgcatggtgcctggtgctttacatattcatctccatttaaaattcacaaccatgctgtggggtaggtatgattaacatatttcactgaggttcaaaggggctacaggacttgtctaaatcacacagccaaccactgtctgcatagagctctgaccaaactcaaagctcatgttcttttaccagacactctgctatctctcatttgaagatttttctgaaataaatacaagcatgatgattggttccacctctggattacatcatgccgatttccattatatgatatgacatcaaaatcttcccgtgctgatgaagaactctatcatagtattactcagtgtgttattatcttagtattaatcagtatagcaatgttgaaaacccttggaatatttcttttctgaatatatgtgcagaggacacagtgaaaatcctgaggactggttaatactagtcacatgagagatgaatttagatgaaagttaaatatagagatgacaaggcagttttcaccacttagatttttttttaaagaacattttcattttattttaaaacaaagcagttcctcttgaattcttcaagccaagccacgaatatatccattaaaggaacagggaagccttgacatatgatcaataagctgctggagggccagtagctcccaggtgggattcctgagaagacagtaggtcagcatcagctgtgctcaggggtatgcgtgtcttctcccagtcgccctcagcccacctctaacaaactgatcatcatggaatcctatttttataactcctttggggcatttgatttttttttctcatttcattgtcacaaaaccatgaaagatcaagtaggaatttccagccctgttttaccatatgagaaaatcaaggcccagagaagtgagaaggcttacctaagatcacaaatgaattcatggaaaccaggtctcctatctctaggaccactgctctttgttctacaccagtgattctcaaccaggggcaatttcatcttccagggaacatttggcaatttctggagagattttggttatcacaagtgggtggggttgggggatgctactggcaactgttgtgtagaggtcagggatgttgctaaatacactgcagtacccagaacagcccacacaatgaatcatctagcccaaaatgtcgaatgttggggttgaggaactcttttctacactgtacaattgtaaactatagaataacaataatattcaatagtaattatcatttattgtatgcttacaatgagctgaaaactctgctgacacttttaggcattatctcatgtttaaatagttctatccccctaggagtaggttttattatacccaagaaagaaaactgagacttggagaggttaagtaacatgtgtccgaggtcacatggttaataagaagtggacccaggactcacatctgtactcagccttttaaactgtggtttatgcatgtatgttgtgtatgtgtttttgtgtgtgtaaacagataaaacttgagaataacttcattttacagtgagttgtaagctagtggggcagatttgaaatgagccctttttctcctccatcctgaatgagacagagtctcataggaaaattcctgcattctttagctaactcaaagttaaggagatttcagaatctccatggggtttctcattttcctactgataacttttgttttagtttcaactaagtagagctaaaagaagcataggcctaattaaatagaaaatgtgaacgtttgttgtactttctctaataaaggcgcttgagaacagtctgctgcagattgttttatctgtgaaccttcactccagagcagaatataaaattaagtacaatcaaatatggctgttgtaaattctgggaattggcttggctaggattatatgcatatgcccagacagtgcttagagaaagtgaaaaaaaagacaaaagttggtttgggcaagacctggcttctcatcctccatgtcttttctttcatgtcacaggcatctaacaattagaattactaattatttattcattcactcacagaaaccaatatatgttgagcttctactgtgtctcagaccctgtgaacaagctaaatcagaccatgcccttgtgtagcctacaatctaatgaaggaatcagatggaaaaaaaaatatgaatcacattaagtattgtcatatagttcccagttttatgtctgctcttatgtgcgtggcattttaatgatgactactgcttgttgaatactgtgctaagatatctgtgccggcatctagcctaggacttagttggtgctcaataaaatgtgttgaattaattggtttaatccacacggtaaacacaagataaaggtgtcatctccattttcctaaaggaaaaacaggcaatgttgtttttactgaagccgagattcaaaccaattccatagaatttcatatccattcctccatctaccatgccataactgcttaaacaatagagtcctgattatttcagaggaacacacattcctttattattttccctttccctttgatcattatgatctctctgggtctttgggatgctgcccattgatattcttatttgcagctccagggatataggaatgaagcccccagccacaaagatatctactctgagagaccctactgtgctcctcttagatgcagccctgatatagattagctccccagcagctccacccacatctcacagggtgtgcccttctcccattaagtcccatctcctctctttctggaagccccatgtctcctccagtcctcaaagttggccatcttctctgcctgcaaagcttcattcactatgctttcaccttttgttgtggtcaccttccaagtcaaatatcttgggttgggtgtaaactaaattgagaaagaagcattttgcctaagttctttctaactggcatctaggcacactgcctaggttcaccatttcactgtagccctttatcattgcttttctatgcagctctgggggtgtagctgtggaaactgtcaatacctctgagaactccttttgcaacaatctgtccattttactttggttgtattttattaataccacaagacttatgttctctctctctctttctctctgtctctcatttagatcccctatttgtttctttcttgatttgtatgggaaggcagaatctcaatcgtattggtatttttatatttaaaccatgggcctttgttttacccttgatcaaatcctgaggtcacatttcttctcctagccatgccagcatgtctgtttctcctctaagtaaaggtttctccctctaccaaataaaagttccaagcagcagtattgtttttactcctaaaccagcttcaccaaagagtatccatgataagaaaagtggtgaaccatttggctccatttggagttttcatacctggcctattgcttttgtatttccttttaagtcactggcttgcaacaatttgccaaagggcgcattgcccagttttgtgcctgaatagccttgacttgtcctataatcttacaaacacccaccctgggctccagtttgtcacaaaccatattctgcaacgtggtggtttacagttcggggcaaggcagatgttttccagattgtgaacactgccatttttaacttgctctgtcagcagccttctcccatatttcatagaagacctgttgtaaggcaatttgtctttcagccatttcttcaaaataaaattgaacgttacagtgaattggatggtggagggggtaaaggaggaagaagtatagcactgttttatatagtttgaagctttctggaagagttatttttatactgcagagattttcaagatgtgctttcatttccagtctctatacattttcaacaacaaagtaaagaacaatagtgacccaaaacttatagctaagtcatgttccatgaacatttttaaccataaaataatttctctcaaaggtttttttgttgttgttcctagtatatattgagtcatttacccagtgtgtaagctgctctagcaataagcttctgaaacctctgaactttttgggctcaccaccatgccagtaagaagtgcttgttggtgtcttaacctttgctgacagaaatctgatataataccacaatgattgttgccactggctttgtaacaaactgttttttggttaagcttctggcaggaaacacatggcacaagccgatagactaagggaaatgttataatgtaattatttagggaggcattggcagaattaggagaaaccattaaggaaaggtgcgagacctggggctaacatgaatgggaggtattaccatcctagatcagttaccttaccttgcagaatatagctgagactgaagagagggctgtccagcacatgctgtggcctttggtagagggatatagtcaaccctcagcaacccagcaaggaggaagccagaggaacaagggtttcaacccatactcttctcctgcctttcatctctggcaaatgactcccataggttcaacctaactggaagccacaggtcaaaggtatccattgacactatcagtagaggttggcctcagcaaggagctggtcagaaaggactgagactggatctggtgggctgaggatactcaggggaaatgtcatcactgactttaaatcgcttcataagagtcagctttaaataaattgtttcaagaaagaaatgggctgggctcggtggcttatgcctgtaatcctagcactttgggaggccgaggcgggcagatcatttaaggtcaggagttcaaaaccagcctggccaacatggtgaaaccccatctctactaaaaatacaaaaaaaaaaaaaaaattagccgggtgtggtggagggtgcctgtaatcccagctactcaggaggctgaggcaggagaattgcttgaaccccagaggggaggttacagcgagctgagattgcaccactgcactccagcctcggtgacagagcgacactccgtctcaaaaaaaaaaaaaagttcagtaagggcctaaataagttatttcaactgaatttataaaatcagagaaccttgggagcaaccatagaaatcatccagcctctacttgaacattgccagacatctccagagacagagaaatccttccacttcaaagtgattatggaatgattccaactgctcaaaagttctgcctttgtaagctagaaaccaaaactcgtatgcaaaatctgattttttttaaatgttggccactgattccaattttttaaaaaacctaataaagaacaagtctatggactggatccaaattttaacttctggataatttcttacacaaatttgaagacatatgtcacatccttcatttgattttctctttggcctaaagatcacatgggtcctcctacatttccttccccattcttctcctctaggtgtttcctagtcctttagagccctccttaaaaatgtggctcttagaagacacctttcagtgctttttaaccagagcaggtagaagaggaccacgatgttcttgatcattacccagtattgccaatgaatactactatgttgctataagtgccatatgtaaaattttttgagcaattgcatcatgctgttgctgggttcatctgagcctttaaatcttcagtaaaacttattagtaatcttttgtttgtttttagggtttggttacatcaacaattatttagtagatttgtctaatcatggattttataaacaagatctttaaccttaaagcaacttataatatttatttttaaaatttcagcttctggtttggattcattatattagcctgtcgagtacgatcctctaaaattttattccataattaaacagttaggtatctttcctagattctggccatttcaagtttgataaacatatcatcaatgataatgttgagcaggcaggattcctcaagcatagccctttacaatttgatgttgattgactgattaacactattaaataaaggcagatgatgaattacaaatacatctgatgatattattattcaacctttcatcttgtccataagaatgtcataagtcacttgagtcatttgatcaaatgttttgctaaagtttaaatgtgcttagtctgtcactaataatctcatcaaaatgaaagagatttaattttatacaacctatagaattttgtcagttaaagattggcccgattaaaaagtgggcaaaggacttgaatagacattcctccaaagaagatatacaaatggccaaaagcatatgaaaagatgttcaatatcactaataattagagaaatgcaaatcaaaactccagtgagataccatttcacacccattagaatgcactattaaaaaaatagcaagtgtgaagaaattggaaccattgtgatctgttgataggaatgtaaaatggtgcagctgctatggaaaacagaatggaagttcctaaaaaaaattaaaaatagaattaccatctgatgcagcaatcccatttctgagtatttaatccaaaagaattgaagtcggggtctcaaaatatttgtacacccatgttcactgcagcattattcatgatagccgtttaaggcagaagcaacccaaatgtccatcagtggatgaatggataaagaaaacatggtatatgcaaacaatggaatattattcagtcataaaaagaaggaaatcctgtcacatggtacagcatcatgaacctagaggacattagactaagtaaaatacaccagtcacagaaagatagatactgaatgatccacttatatgcagtacctaaaatagtcaaaatcagaaacagaaagtaccatggtggttgtcagggctgggggaaggggggaaatggggagttattcaatgggcatagagttttagttttgcagcatgaaaaagttctggagattggttgcacaacaagaataaatatatgtaacattattgaaatgtaaaattaaaaatggttaagatggtaaattttacggtattttttacaattaaacattttttaattattaaaaaagattagcccaattcttttatagaggaggaaactgaggccctgagagtttacagaaacttttagtgaacttgtgtggattccagttactaagatttttcccaaatgctcacaaatgagttgctctccctaacttattgtagttaaaaccttttctgcagggaaaattttaatcaatgtatatggcctattcagcatttttttttaaagaattcatttgagaatacataaggcaatagatcatctacttagtatttccatcatcaagtcaagagagtgaatgcctgggcccagcctgccaactgaaggcctaattacctctctctctcgccttccaggcatatgcctaaatcactggtgcaggcccctatgtgctaccaacctgcttattttatagttttcaagtaataaattggtagtgattcctgtttgttttctatggtttttaaatttttttcagtcaaggttataatttaaacttgtttaatttcccttgaattctaaggttctgtaagatttcttcccacctttgccatatttaaaaccagagccttttcttgttttaactcaaagtaatatcccagatgatgtttcactttattaaaagtacctctttaataagaaatcatgattactttgctttaagcttcagggaaagaaaggagtattttctccattatatttaattactaatcaaagtattgaatatcattgtaaaaataaaataggaatgtcagatgtgaactgtgataccaaattgtttgatttttaaaaggaaattaatcatgtgatctggactaagtggttggtttcaaaaatctcaagtatttaacttgatgtaactaatatgtgcatttcacttttaaacagttattccaaagtattaaaaatcttcaacattctaatttccagccgattttctctgtaatgcattggaggtgtccattaccctttaaaatgactagtaagaataatgtccattgttccaaagtgattttcttaaaatagtatgattcccaccagatattagtcttcattgaaagagaacttcggactcttaaggagaatgatgaaaaacaattatatatataatgttttagggtaattttgattagtaatataatttactagaagcactgaaggtagacaggcttgcattccaacccagactttgctactttgtagctttgacaagttatttttcctttctcggtcttaatttctctgtgtgtaaagtcaagataacaccaatgtgccttccgggttaaaatgaggaatacaaatgctcggacttcaaaaagaacctaggcagatattagttttctaatttttcatttggaaggctcattgttctatggaatatttttatagaagattttcagagccagcagagactgaatccccttctggccaaatgcagagagctgtgtagggaaggaagcactttgtatggaagacttacaatgggcctgaatgtgtttctgtcacttccaacatgaccatgtattgttctccttgattatttcacttggcaaaaagacactgggccccttgtgcttgttagcatatcctcagtgtaatcagaaggagccaagcttgactgtttaaaggattcagcttcttgaagtttgttctcctgcagacctacagggggatttgtcccagaccctcgtttacaatagaagaccttccatgaataatctgatagggcatgaatacagaatagactcctttgtttgccaggcaggtgaggccctactttctcttgttgctaaaaatctggcctggaaaaatgactagcattgcgttagtactaaattagcctcatcgcttttgtaatcattaccctcaaaatgatttcactgaaaaaccaagaataacaacagagactttacccccctagggtactgagaaatatgaaaatggtttataatgttaataataaccataacatccaacaactgtatggcaattttcaattatccaaggttctttcatgaacattatctcatttgattctcaggtgaaccaaataagattggtagagcagggactattattcctgctctaccaatcgtatttattccattgaataaatgaggaaatggagatcagagagattgtttcttgcttaagattatctagcccaaaacttttacctgtgaatccccctctagtctaagggtaaagggtaaacattgagtggtaactggtactagaatagatttgttgcttacagcaattctgtgaagtaggtattactcccattttacagatgagtttgcttggagtggcaaagggcctactgaaggtcacgtagataatgaaaaggcattattcagaggtttctgacttggtgccctgtggcagaccgtcttctactcaggtgattcctttctgtctatctataggcatgtagacacaatcattactggtgcaaccagcactgactacgacggcctccagtgatgcctgggttatatatttacctgtaacagtgtataaagcagggattttctgtaatcccagcactttgggaggccgaggcaggcggatcacgaggtcaagagatcgagaccatcctggccaacatggtgaaaccctgtctctactaaaaatacaaaaattagctgggcgtggtggcacgtgcctgtagtcccagctactcagggggctgaggcaggtgaatcgcttgaacccgggaggcggacgttgcagtgagccgagatcgcaccattgcactccagcctggtgacagagcgagactccgtctcaaaaaaaaaaaaaaaaaaaaagcagggatttcaaaagcatcacatttggcaaaacttcagtgttattcccttcctttcagatcaccctcatccttcctacctccatgaaacaagaggaaccctactatgagaaaataggggcaaaattctccaattattggcagtgaagtgtagtagctagaatggtgggcaaaaagcaagaccgacgatggaatcccagcttttgacttactagcagcatgtccttgggcaacttacttaaccactctgtcttccagcatcttcacctataaaaattaggataaggatgtcatctaccttatagagttggttgtgacataaaatgagtttatgaaaagcacctggtccatagtaataatagctaacatgattttgcaccagtagaaaatatttgataaatattaaaattgcgttttgttttgtttttttgagacaaggtctcactctgtcacccaggctggagtgcagtggcgcaatcacagctcactgcagcctcaaccttctgggctcaggtaatccttccgcctcagcctctcaagtagccaggactacagacatgcaccaccatgcctggctaatttttttaattttttgtagagatggggtttcgccatgttgcctaggctggtctcaaattcctaggctcaagcaacctgcctgcctcagcctcccaaagtgctgggattacagacatgacccactgcacccagcctaaaattcgtattatttttattctactctgtaaccagatttaacccctctccaggctcttctgagggctaactcacagggcacagtcccaaaaccaggttttggtattccttttgaataactgatatgccatatctcacctgccaaacagttcccaaacaaggtgtgtacaagtaaaaactacatatggtttattctcatttacatgtactagggtaactcatcatttaaaggaccttttgggtcttttcatcactatctttatacttccagtttagcatttacaggacatgtcattatctttcttctattttccttaccagacgatgagctccttaagggcagaggacatgtcatacctaattttgtattcccagtacctacaatagtgcctgacatgcagtagcttttgtttattgacttactgaatgagtggaagggtaattgaatgaatgcatggttaattcttttgtaaggtaaataatcatctctgaattttgtgtcaatttgagttttcacactttgagttttcttaaagatagctgatcttcgttatcagggcatgtcattatgtaacccctctaattactatcccataattctgtgtttgttttaccagtcaaataattcattaatgacaatatatgcctaagtatttggtttcaatggttaggctcaaactgataaaaagacaagtatgtctcgtgttctacacatattatattcttttccaagcaatgggatataagatttcaaaaatatacttcaaagtgttagcactcataattattgggctcatatgaaaccatttaagaattctggggtttcaataaagtgtcagattatacagtgctgccatgctggaaggaattatagacaccatccaaaacagacacttcacttttgcagaggtaaaaaatgaggcccagagacgtgaatatttgttcaaggtcacacagctgatcaaagatcaaactgaccctgacttcaggcccccatattctcaggccagtggctttttggacactgggaccaggattccttagtaatgttgattctggaagatgcaggcttggccccataagtccaaaccagccaagacaaggtcatgatttctagaacaccatcttgtgggggctgatctgggctggcagccaatggaagaagagccctgtggtccacattaaggctcttggatgtatacagtccattcacgtggcgtttaacttttaaggtgttagagaaatgtaggtctgccactaaagagaggcaacatcagaggaggacccacacacgtacaaagtcttcataatgtccctctgcagtttttaaacatttgaactttaaacttttaaacttcaataaattatgttgaaggtttgatggaaacaaatggtaataagcagtggattcctttcttctcacagtggatttgtgtgtataaaagaatagaagaggtggttcattttaaactatgcaatgtaatattatgcatgttactttaaagagtataacttttgctctttttcatttctgcacccagattcaaaggattccaaggagaagaataaaatggaaatcctgtacatactagtgccaagtgtggccattcccctggccattgctttactcttcttcttcatttgcgtctgtcggaataaccagaagtcatcgtcggcaccagtccagaggcaaccaaaacacgtcagaggtcaaaatgtagagatgtcaatgctgaatgcatataaacccaaggtaatgttagcagtacagagctacatttgttccgtgggcttcaagttaaagcaccatgttataaccctcccaagcttggaaatcgaatgatatggaatcagagttttataagtgctaaggttcattttaaccaaatgcaaagacgaactacctacctctatctaaaccaagacactttcatcagtatgtctacttcagtgttgagccagccatatcactgccttgccatagagtcattgggctagaagtgatccctaagaaatcatcctgaccagcccgtcaggactcagaacgtgagcaatttttcaaaatttcaaagaggaaatttcatacttttccatccaaattgcaagagagaacaagatccatcattgttcacaaacttcactgtcaagaaccttttcgttgcataatatgcaaatagttaaaaccactgtactatatacttaaaaatgattaagatagtaaattttgttgtgtttttttaccacgatttaaaaaaaatcctttgtatgcctaacttacatccctttttctttggcttaagtatattttaaggaagtgttgtccttccaatagtcttcgaatgctgttttatgataaccaaccttagccttccccactttgagctaaatcaaccccttcccttttgcttttcatccacatctttcaacgtttgagttgctcgaggtcctggcaaggaacccagggtcactggcccttaccttaaatggagcccctgcactgcatcttggaactaaaatacaacagagtctttctttcaggaaagccagcaccacaatcccaggcctctcagcaaaaagatttcatttaaataatttaagactcttgcatctaacagcctgtttttttttctaattattccaattccataagaacattcattcattcaacaaatatttatcttccctgtggactagtaactgtattattcttttgatcctcataaagaggagaagcatcacttttaataaaattttaggaaaaaaaagtcttcacactcaaattaactaatcctcttatctaataaatggagtagcgtaattgggctgacacagagccctcatttttttttctgctttactgtttaaattttttttatctaaaaaatcttgaaaagatttttgctattataaagtcatatttattaataggatttggaattccttaaatgctaaaaattcagtgtatatattctgtattcagcaaaaccactgatctcttgctgagtgtgaatttttatcattaaaaacaagcaaacaacaaaaaaaaaaccctacaaatcctgaagaccatagagttcacacagtagcctggaggatgggcagggtagggattcaactcttttgacatcccagcttctagctagctgatttacatatattatagcattttatataatatcacatttaatccttactacttagtgctactataaaagtagtgaaagcaaatggatgggggttaatattgctacacattcacctagttgacctggcagatacttttacctagctcatgacttcaagcttctagtgtaagagtcattgttccatgagactctttccctttcatttctgttggtaaatgttgagaagtcttagaaacaccagaactctgggcgggggagagacctagatcattttggttacagcagacggcagtttggtgcagtagccaccatcctggaaagatgtactcctcattgccagggcaggaaccatggaagaatcatttccatttttagaaattatcaattttgtgggttagccttaatctgcaattgaattacatttttagtggaggtttgttttatatcacatgatctccaacagaaattccagagagctttgtggcataaatagaaaaaaggctaatatatatatcgatgaatacaaactgtcaagaacaataccaggagcttttacatccattatcacacttaatcctcacagctattatataaggcaggtattattattactattgtacaaccagggtaattgagacacaaacagactaagtaacttccccaaggtccaagagctagttattagaagcaataaaatgtgaatacaggatctttcaccttttctaaatagagctggcccttgctcttgcagaatccgtgataactttttcacagaacagatcaagttgggaaggaggagggagggttaggcaagcaactgagtgtgatcccatttggtcagtttgtgcttcagagtaaccacaggcattctcctggcttctgacaaatatttaaggggcctgcatggcagtctctgaatgatgtagccctagccctgccagggacatgtacaatttggctagagcaataatagttccccatccttcatggtcagagacaaatgtgaaatatactggcatgagttttcccagagactgggtgaagtaaacattgttttcatagtttctggatcatttctgaggtgtgccttgctaaatctcccagtgtcaagatttgtccactatgaggcttagagcttagccttaaactcctgaaccagagaagtagaaatggcttaaatatttgaatgggttggggaggggaaaggaaacaacaaaaacaaatgctaacttttttttttcttacacttctaagggacttggctccgatcaaatttgagttattcaattgtttgttttggttcttactgagtgcctttcctggaaaaagcacaaaggactctgtagaccttaaagaaaattcctaaatgtaaacagaaaatctctaaaactgctttggaaggtcactgacacataaatattacatgtacctataaaatctaaaaggaaaggacacacataagaaagaaacaaagaaaagtcctgaaaacaaacactccaccagagcaaaatcaaaagaatatttggaggcgaggatgaaaaaggaatgaaggatagaagccagtctgccctagccttattcttttttccccttggccaattcaaaagtcagagactctagggttcttatttatccaaatgaatgtgcccttcagggtttaaactctctgcttccatctctcttcacttgctgagccgctaaaattctcctgagtgtttggattgagaagaagaggctcctgtgggagattagaaactgatacccttgagagaggacaatagggagctgccgacagactggctgacgaggcccggcttgggtccccagagaggtaggacagtgcagttggaagtaaaagcttttgatgagccatgagtttccttctgatctgtgggcaaaggaagccagtggaccagagaggcaccttaacgccgaacaatcaggaagatggagatgtcctggctcccatgccaactgctctgtgactctgagaagccatctagctttttgcagttcaattttctcagctgttcaggagaagaagtagactgcattcaagtataagactgtttattttcctgttattttgtttagccaaagatttgaagccattcaatcctctaacgagtactgtagtgttgcctaaactaagcaggattttctatattgcattacaaattttacaatctgagtgaggttgttttttcttcttttagtacagcagaaattgaaccttctcagaggagcctggaaactctaaattcccttctctgtttcttttcctttgcttctccttcccttgcccctacatcccctgccaggtatgactctggaaaacagcattctgtaagcttgcttgggtaagggagagaagctgtggtatgtgctactgtgggagcagggagggggcagagtctccccttcaagaacaggatgggtcccattcagcccaggcctcctggctcctcacctgcctggaggttaggcagacagagaggttaaaagatggaggagtctgaggggcatggttgctcacacctgtaatctcagcatttgaggaaaccaagctggacagatcgcttgagcccaggagttcaagaccagcctgggcaacatggggaaaccccatctctacaaacacacacacacacacacacacacacacacacacacacacacacaattcgccaggcatggtggtgcatctctatactcagagctactcgggaggctgaggtgggaggattacttgagcctgggaatttgaggctgcagtgagctaagatcatgccactgcactccagcctaggcaacagagtgagactcatctcaaaaaaagaaaaaaagatggaggagtctgagaatgggggcgaggaagagtcaaggcaggccaggggtgtgagatgcagccaaagcctggacagcccccatgagtcgaactcctgcagctcctggctgatgtaaggaacatcgcaggggaaagaaagcaagactggcccagctttccaaagctgatggctgtgttttacttctcaatttaccctcatctcttgccagcttctctcctttttcacttccagacaattcatctctccgttttcctttccagccaaagtagttgctgaatatactgaaatttgattacattctctggccctgtcccttttgccagcaacatgcttccatctaaaagccctgctggagtctggctaccctttttaatttgctgttcttaccaaatgtcaccacacttcatgctaaaatatcctcgataatttttccactcactccttaaagctattgtctcccaacacttctgagctcaccattctattaacatgggcctcttgggaagcaccagtgatgttatttaatccagtgacctttgccaagtcttcctcccctttaatttctctggagcctttgatattcttaaccaccatcctgaaatatatttttttttccccttgactttcctcctatctgcttcccacacttccttcactagttcttttaattcccttaatgggagcatcctctgacattcttttcctctctcattctcttgagctgatttcatcctctggcattgctctagctcccccttgagtgtaatgatttcccaacctggaaggcccagtttcaagttataaaattcttgccaccaaaatcctgccacccaaaagtccatactatcggggcctagcttacctttccagccacacttttctcttagtttatttctggaaagtagtctgatacacttcaaagagcaagagtgtagagacaaagagatatgattacaaatcttggctctgctgtcaactggccacaagatcttaagcaaataactaacttctctgaaccttttattttctcatccataaggcaaggataagaatagtacttaaaagggatattttttacactttgagatagcatgtctggcacctcacaggtacttaataaccagaaattactattattgttataactgatgagtacagatcttttttttaacttttattttaagttaaggtgtacaagggcaggtttgttatgtaggtaaacttgtgtcatgggagtttgttgtacagattatttgatcacccaggtattaagcccagtactcattagttatttttcctgatcctctccctcctcccaagctccaccctctgaaaggccccagggtgtgttgttcccctctgtgtgtctatgagaacaacatttagctctcacttaaaagtgagaacatgcggtacttagttttctgttcctgtgttactttgctaaggataatggtctccagctccatccatgtccctgcaaaggatgtgatcttattcttttttatgtccacatagtattccatggagtatattgtatgtaccacattttctttatccagtctatcactgatgggcctttaggttgattccatgtctttgctgttgtgaatagtgctgcagtgaacgtatatgtgcatgtgtccttataataaaatcagttatattcctttgggtatatacccaggatttaaattgctaggtcaaatgctatttctgtctttagatattttaggtttccacaatggctgaactaatttacactcccatcaacagtgtataagcgttcctttttctctgcaacctcgccagaatctgttgttttttgaccttttaataatggccattctgactggtgtgagatggtgtctcattgtggttttgatttgcatttctctaataatcagtgatgttgagctttttttcatatgtttgttggccacacgtatgtcttcttttgaaaagtgtctgttcatgtcctttttatggggttgtttttctttaaattccttagaaatgctggatataagactttcaccggatgcatagtttgcaaaatttttctcccattctgtaggttgtgttactctgttgatagtttcttttgctgtgcagaaactctttagtttaataagatcccatttgtcaatttttgctctggttttgattgcttttggtgtcttcgtcatgaaatctttgcctgtgcctatatcctgaatggtattgcctatgttgtcttccaggatttttataatttcgggttttactttttttttttttttttttttgagatggaatctcgctttgtcacccaggctgaagtgcagtggtgtgatctcagctcactgcaacctccacctcctgggtttaagcaattatcatgcctcagcctcctgagtagctgggactacaggcatgtaccaccacacgtggctaatttttgtctttcttcatagagatgaggttttgccatatttcccaggctggtctcaaactcctggcctcaagtgattcacctgccttggcctcccaaagtgctgggattacaggcatgagccactagggttttacatttaagtctttcatccatcttgaattaatttttgtacatagtataaggaaagggtccagtttcaatcttctgcatatagctagccagttatcccagaaccatttattttactagggaattctttccccactgcttgcttttgtcaggtttgttaaagatcaggtagttgtaggtgtgcaatctaatttccgagttctctattctgttccattgttctatgtgtctgtttctgcaccagtaccatgctcttttggttactgtagccctgtagtatagtttgaagtcagctagcatgatgcctccagctttgttcttttttcttggctatttgggctcttttttagttccatgtgaatttttaaatagttttctctagttctgtgaagaatatcaatggtagttgagtaggaatagcatttaatctgtaaattgctttgggcagtatggccattttaatgatattgattcttccaatctatgagcatggaatgttttttcatttgtttgtgtcatctctgatttctttgagcagtgttttgactacagctcttttaatgaagcaaatgctgtgcaaacatagattaatgaagcaaatgctgtgcaaacataggatactgtgggctggggaggaagctataggatccagcaatgcacagcattaactggggtgaggacacaggcaagagaatcccagcaaagattatagaggtagctctttggacagctctcgtattccttgtgtccatcctgttagcatacattctcctgccccacaccctgctcacatcctggataaaatccatcagggtggagaaggtctgacagtgagggctgggaggctgcccggtacataacctcagcttaaaccaatgtctatagaaactctacttctgggaaaaacaagtcctataaatgactatattataaattggcatcataaacggactaaagtacttcaatatctcaatagaatctttgtaataaccctatgaagtaggtactaatttaagtctgatttttaggatgagaaaactgaggcttcagattcagaattggcccaaagtcacaaattattaagtgacagagccaaacttgaacccaggtctgctcaggtgcagagcccagtgcttttctatttgcctctactgcctttattttcaggctgactgaaatatatgagcccaagttatgagcacgtgatggctcaagctgacattaaaattactggcatctgttctgtctatttccaggcagaatagaacctctcccattggcattataaagtaactcaaccacagaatcaaccctgctcaccaccaaacattcaagctaactatcagaaagttacgttatagagaaaagaaatgcttctgaagttaaatcacttccagagaaatgcagctgaactccaagcaagtgtggcaaaatattggttgaaactccctctagaacttgattgcataagccagaaggcacttaatccagctgtagtctttgaaaatgtccataacctcccaaaacaaaatggctgtggcctctaagcttttaaaatgtaatcatttccatttatgagtagagtcaattgtttcataattctaacactgtttacctaagaaccagtaaaatgcacaagaaaggaaaataggttttggagtcaagcagatccatgtcaacagccaagtctaggtactaagaaatcttacatctatatactctccagggctctcatgctcaattcaggtgaaggttgccatggacaggttttgttcatctatcccagtcaactagctagcagagacaacagagcatcaacggagtgaggtctaactcaaaaaccagagagctcttataccttgagcatttcacttttgcatcaatggtcctcatgcttttaaaatgtagagtcctttgaggatcagatggaaagtctgcctcctcttcccagaaagctctgcaactttggtgtcagacattcttggatttgaatcttggcatcaccacttaatagttgtgcttctttaggcaggctacttaaccactgaatgccttatgtccttatccataaaatgggggcagtcgtaatatgaatctcacagaattgtgataaggattaaatgggttgatgcattaagcactttatgtccgagagcagacaaggagtatagtgtggtcattagcaaggcaggctctggtgtctgaattgaccacctaccagctgtgagaccacttaactgacctgttctttggtttttccatttgtaaaataggtgtgagtcatagttaccaatctcatggggttagtgtgaggatgaaaggagctaatatgtgtaaagtacttacagcctaacatataagcattcaaaaaatcatagccattattaggatctcagtgtctggcacatggcagatatttaataaatggtaggtattgttaaattcagattacagatatctaggataggagccatgtcttctctcttcatggttctttcatggcccctcatatagtagtctgtatgtatattcttcagtatattgtatatacagtatcagttgactgactgatgcaactagctattaaaatatatcctaaatgattggctctaattgaaactaaaggaaactggtgatatggcccaagctatgactacaagtagtcatgtagtatataaacctaataaatgctggttaatggttcttatatttttctctacctgatatttccaaagcatcttttcaagcaagagtattgttttctctcagttggataagtttaaattgcccaactaggttcatcagacacattgtggtcattcatcatgcagagagaagggacccagatcactaaggaattgactgatccagaaaactacatccatttattccaggggctctcaaagtgaggcctctaggccagcaggagtctcctcaactgagaactgtcagaaatggacaatctcagacccacataggaactcttgaggtggagcccagcaatcccagcaatctgtgctttaacaagtggcactgatgcctgctctgatgtagactatgctggtcagtacttgagattcaggaagcaagtcagcccatagggaataccaatctcagagaaaactgtgcttccaaagagaaaaaggacctgggatagccctcctattaccaaaaatactcctctaattttagtagggccagggtctgctcatcattcctctgatggggtgtattagtctgtttgaacactgctgataaagacatacctgagaatggaaagaaaaagaggtttaatggacttacagttccacatggctggggaggcctcacaatcatggcagaaggcaaggaggaccaagtcacatcttatgtggatggcagcagacaaagagagagcttgtgcggggaaactcccccttatagaaccatcagctctcatgagacttattcactatcacgagaacagcatgggaaagacctgcccccatgattcaataacctcccactgggtccctcccacaccatatgggaattcaagatgagatttgggtggggacactgccaaaccatatcatttgacccctggtccctttcaaatctcatttccttacattttaaaaccaatcatcccctcccaaaagtcccccaaagtctcaactcatttcggcattaactcagaagtccacagtccaaagtctcatccaagacaacgcaagtcccttctgcctatgagcctgtaaaatcaaaagcaagttagttacttcccagatacagtgggggtacaggcattgggtaaatacagccattccaaatgggagaaattggccaaaaaacaaaggggctacaggccccatgcaagtccaaaatccagcagggcagtcaaatcttaaggctccaaaatgatctcctttgactccatgtctcacatccaggtgactctgatgcaagcagtgcatcagacacctctgcacctttgcagggtagagtacccctcctggctgctttcatgggctggcattgagtgtctgggacttttccagactcacagtgcaagctgttggtgggtctaccattctggggtctggaggacagtggctctcttctcacaggtccactaggcagtgccccattagggacttgttatggaggctccaaccccacatttcccttctacactgccctagcagaggttctccatgagggcctcacccctgcagcaaacttctgcctgggcatccaggcatttccatacatcctctgaaatctaggtggagattcccaaacctcaattcttgacttctgtgcacctgcaggctcaacaccacatggaagctgccaagccttgggacctccaacctctgaagccacagcacgagctgtaccttgaccccttttagtcatagctggagtggctgggacacagggcactaagtacctagactgcacacagcagagggaccctggtcccagcccacaaaaccattttctcctcctaaacctctgggtgatgggaggggctgccgtgaagacctctgacatgccttggagacattttccccattatcttggtgattaacatttggcttctcattacttatgcaaatttctgcagccagcttgaatttctcctcaaaaaatgggattttattttctattgcattgtcaggctgcaaatattccaagcttttgttctgttttccttttaaaactgaatgcctttaacagcacccaaatcacctcttgaatgctttgctgcttagaaatttcttccgccaaataccctaaatcatctctctcaagttcaaagttccacaaatctctagggcaggggaaaaatgccgccagtctctttgctaaaacataacaagagtcacctctgcttcagttcccaacaagttcctcatctccatctgagaccacctaagtctggatttcattgtccttatcattatcagcattttggtcaaagccattcaacaagtctccagggagttccaaactttcccacattttcctgtcttcttctaagccctccaaactgttccaacctctgcctgttacccagttccaaagtcacttccacattttcgggtatcttttcagcagcaccccactctactggtaccaatttacaatattagtccattttcacactgctgataaagacacacctgagactgggaagaaaaagaggcttaatggacttacagttccacatggctgggagcgcctcacaatcatgacggaaggcaaggaggagcaagtcacatcttacgtggatggcagcaggcacagagagagcttatgcagggaaactcccccttatagaaccatcagatctcatgagacttagtcactatcacaagaacagcatgggaaagatctgccccctgactcaattacctcccaccaggtccctcccacaacatgtgggaattcaagatgagatgtgagtggggacacagccaaaccatatcatgaggcaagcacaaatgccatgtgaaacctgctattcttctgtagacacttgtgtccagccagaatcagcttcaaaagaatagcatagatttgaaaaagggcagcagtcagtcttgggacattagaacatggggaattaactggccttgagtgaaagggaccacagggggaggtttggagctgacttatgaatatggatcctgtttcagcacctactgttgttaaagccccgtttctgtcccagagaaccaccctgggctcgattccctgcaccctaatgtagctctgtttttcatctgtgtgtctacttcaagttagactcaaaagtagagcaattatatgacattatgttcaaggcaaaaagtgacagagcaggcttcatgttgcatacaaatgttggcagctattgcaaaatcctcaccgcatatcctatggtaatcacttccttaaagtaagcaggaaataggttagtagtaggctgcttcaccaggagtcatttcaaatgtattgtcacctaaggtataacttcccaaagatggaaagagataaagccactgagtctgccctctttatccatctacagccaccaaggtaattacagtttttaaaaacgctactcatagttcattgctttcatatctaaagttaagagatctaaaagttcccccacatccccacttagcagtcatgactaaggtgaaaaaagccaccagtatcagcctggtctctcttatcagcagtttagaaagtactacaattttcccatctgactcacatctaaatgactcgcatctaaaatgtttttccttaattttccttccgtaaagagttcatttaaactctaatactgttgcttttcaaaaatttctaaagaaagaagcatcttggaacaatgtattaacttctgcatcaacttttatttcatataataattttatataattttttaaaggcagatgtgtgtttactttgagaagtaaaaatgttaacattgaaactgaaagcctgtttcagttttaaggtacttaattgccttacagcatataataaaccgaggccatcttgtccttcaactaatggagggagtgataaagagataggagcccgggaccctattcattccagttttcctttgtacttggtttactttggcaccatgcctcatgtgtattttacacttctttacattttgtacatccctgtatgacaaatacttgtcaaacaaaaactaaacagatttataaccccttaacttgaaatgagccaaaattgaactgccaaaactttatgacttcattttctttcatagttttccaccacattggttcaaacagacaaactccacttgaggtcaagcagaggtcatttcactttcattactaaaatataatttacaatatgccagacctaaacaagtttagcctaaagggtttgtataatgtaaaccatctgttcctcaacaatacagctaatttcctgccatcaccgtacagtctactgactgcttctttaagggtttttatgattttttaactagttcaggatttatgtaaaatttgaaaatgagtctatagttaggattcatttgtaccaagtaacttgagcaccttaaaaatgcaaatcactgtggaaattgttcccctgaaaccaagctaggagcattttttttctgggcacttctttgctggcagctgcacaggtgttcgaagggaagattttgtggactctgccattttagatgctttccatgcctctttgcaaagcaaaccccccaaatttagttttcagtagctctagtaaatgactccttggagaagacttgggattatatgctatatggcccactggatattggtgagataggacaagatacactttggggtaaaatctactttctttcatgtgtctgaacagggaggaagaacaattataattccatagagtgaccacatactgaaggctaacctagctctgtgaggtggcaggcctctcaggctgagcctccagagacattcggcttcaatctgggattgctggccagcaggcttctctggtttcaaacagaatgctggggccgaaaaacagagagccttggagttgcaagtgtggctctttcggctctcctgaaaattcttgatactttctttagcccctttctccatctgtaaaatagcaaaattaggcgttctgtttccaaaggcaagtatatgagaacaaatttgcttacctcagtggaggggaatgcagctggccttcttagccacgaagccccaaggccatgtgtagggctgatgccaaggtcctgtccacctcttcctcttttcccacctccagaagtttggctggcttgcttcctttacccatctgctaccatccactcttccacacgagttcttgttgccttcaccttcattcacatctcagaggagccagctacaggccactcaacttctcacccaccctcaagctccaaaacaaattccctgtcatttttaaaggattttttttttttaactagcaactacaggagaacagagaaagattaacaggaagaaagttaaacactctgcaactacttaaggcttaaatggatctaaatcatttgcattactttacttcctggatgactttcctaataaggataataagaatgatttaaagggcacttattaggtgggaattacgttcatacatcgttgtatttaattcctactgcaacagctcaagctagatagtacattagttcatagatatggaaacagaggttcagaaaagttaagaaattcacccaaggtcagtgattaatattataagacctatgccacaggatcatggtgttaaataagttaatatttgctaagtgcttagaacattatctggcacaaagtaagtgctatgtaagtattaactattattcataaaaagcagcagattcaagatgcaaacccagatttataggagtccaaagctcacttagtttgaattatgccatactgcctatggatacttttcaagcagtgaaggaggagagggtattgggtttctaactcctcattataccagcctaatattccatgagtttacttcctaattcccattttccacaaagaagttttagtactcagtcccttaaagttctctgtctccaaaagcgtagagatcttatttttgtcaaaaagtaagtgatgtctactttgccattcaagggaccttcacctaaactggatttatttacatcattaggaaaagttctcatggaaatctccaatcttaatgtcatgcaggaaaaattcaccttgagttactcttgccagcaaaagtaaaatcatctgagtgctacaagacaaaaaaagtagggttggctcaactggttacctttctcatcacccacaccttgctctctcaaaggaattctacaagctcccacaagaatacagaccctaaaagcaaaaggaaaaatggtggatggacttacaattgcaaaagatatttcctagttcagtaagatgggaagattcgcctattgtttttttttttttaaaaaaatagttatttaatttaaaaaaatagtaatttaataaattaaatagttatttaatttaatatattcacctggttgaaaaattttaaagcatagaaaagcagaacctctgcccccctttttctagtttctacttccatacccccaataatcactgctatctatttcccaagtatcctttcgtagtttctttattcttatacaaagaaatatgtttcatgtgttctttttctccttctctcttacacaaaagcagcatccagcattaactgttctgttgctttttatttttagctgagcaaaggattttgcagaccttcccataccagtacatacgaaacgtcctcattcttttttttcaaatgtggaatattctatttactagctccactgtaattgatttaatatattctctatagggacatggaggtcattgataatattttgctattacaaacaatactatattgaatagaactagatcaataagatttaatttactgaaagtttaaagcaacaaattaccattactttcagcacaagtaaactttctaaaactcatttccaaatataaacctcacaaaatctgctttgatgaacaaataagaccaatttataatgagacagtttatttgcatagaataattaatgttccaaaatccccaatcccaatttgtccttttaagtgagtattttgctgcaagtttatttacacttacaattaggttagtgggcattttgccctggaaaatatcagcctagaacaaatctaatcatcatgaattctaaattagtagagtttggataagagaacttttttaccaaattatctaaactgttgttttaaactctgtacagagagctctggatttcatatgtatttcaacattgtcagtttcagttagaattttcagggtagtattcttttttaaaaaataaggatttgaaggatggggattatttgaaaaatcagttgtatgtaaaatgcattgtttttattactttcttttctaacaaattaaatgaaacatcagactaaatttgaggtacattttaaaatagtaaaaacatataacattatagacatttacttgccaagatcaaatgtcatgattcaatacttattttcattgtgagctaatgccttcacctgtctgtcttaaggtcaattaataaacaacccacttgcgaagacctagggatatacgttggtatgaagggcagtgcttccaataagatttcccttgaaatctcgttgtgaggacaaaatacatgcataaaaagaacagaaacatcaagttgataataataacaaaaagttaaatagtacttaccatgggccagacataggtctgagtgctttacaaactttaactcataggtctgagtgctttacaaacattaactcattaaaagtttgcaataacatggtaagtacaattattatcatcccattttatagatgaaggaattgaggcaaaagttaaatgttgtatctggggtcacacagctggtaagtggagaaggcaggattccaactcagactggctatggaggccacttgtgtaaccagccaccacactgctttgtgtatgtggtggcattcacagtaaaggcaaaagagtctagcaaagaaatgaccatagtggtcagggaaggttttgcgggaagtggggcctgaaacaggctttttagaaaacaaaggatttaatcaatggagaagaccgcatttcagaccttcccatctctattgtgagtacttcagaaggacaatcttttgttttggtttctcttttagcacaataaatattcgaagaatggcagaacattggaggaacaaaagtattaggcaagaatgtaaatggtttcaggagtggacattgagaaaacctatttaactaaagtgatgccatcacacagagaagtagcaagggatcatgtcaggaaagtgagttaggaccagattacaaatgctctgagtaccaggctgtagcctctgtggtagtgcttctgacaccctaatcttcacagaaaccactggggtcttgttaaatgcacatgcagattcagtaggtctgaggtgggcccaagagtctgcatttgcagtaagtttgggtgatgctgatgttgctggtccccagaccacagtttgagtaccaagactctagacaacagcaaaaaaccattttgtggctgggttgagggaaagggatagggtagtgatggaaagttgtctatggcacctcccctgagttgcagccaacgatttgaaagatatatagacctacaatattttattgaatttgtttatagaacctttttctatatgccccgtccctcctttcggatgcaaagctgtcttgcctgaagatatgttttaaaccacgtttttcctctctttcatacagagcaaggctaaagagctacctctttctgctgtacgctttatggaagaattgggtgagtgtgcctttggaaaaatctataaaggccatctctatctcccaggcatggaccatgctcagctggttgctatcaagaccttgaaagactataacaacccccagcaatggacggaatttcaacaagaagcctccctaatggcagaactgcaccaccccaatattgtctgccttctaggtgccgtcactcaggaacaacctgtgtgcatgctttttgagtatattaatcagggggatctccatgagttcctcatcatgagatccccacactctgatgttggctgcagcagtgatgaagatgggactgtgaaatccagcctggaccacggagattttctgcacattgcaattcagattgcagctggcatggaatacctgtctagtcacttctttgtccacaaggaccttgcagctcgcaatattttaatcggagagcaacttcatgtaaagatttcagacttggggctttccagagaaatttactccgctgattactacagggtccagagtaagtccttgctgcccattcgctggatgccccctgaagccatcatgtatggcaaattctcttctgattcagatatctggtcctttggggttgtcttgtgggagattttcagttttggactccagccatattatggattcagtaaccaggaagtgattgagatggtgagaaaacggcagctcttaccatgctctgaagactgcccacccagaatgtacagcctcatgacagagtgctggaatgagattccttctaggagaccaagatttaaagatattcacgtccggcttcggtcctgggagggactctcaagtcacacaagctctactactccttcagggggaaatgccaccacacagacaacctccctcagtgccagcccagtgagtaatctcagtaaccccagatatcctaattacatgttcccgagccagggtattacaccacagggccagattgctggtttcattggcccgccaatacctcagaaccagcgattcattcccatcaatggatacccaatacctcctggatatgcagcgtttccagctgcccactaccagccaacaggtcctcccagagtgattcagcactgcccacctcccaagagtcggtccccaagcagtgccagtgggtcgactagcactggccatgtgactagcttgccctcatcaggatccaatcaggaagcaaatattcctttactaccacacatgtcaattccaaatcatcctggtggaatgggtatcaccgtttttggcaacaaatctcaaaaaccctacaaaattgactcaaagcaagcatctttactaggagacgccaatattcatggacacaccgaatctatgatttctgcagaactgtaaaatgcacaacttttgtaaatgtggtatacaggacaaactagacggccgtagaaaagatttatattcaaatgtttttattaaagtaaggttctcatttagcagacatcgcaacaagtaccttctgtgaagtttcactgtgtcttaccaagcaggacagacactcggccag

SEQ ID NO: 31 - DNA, 104083 bp, Homo sapiens
  DNA (1)..(104083): CD10
gagagcgccgagacgcgcggggcgcggagatgtgcaagtggcgaagcttgaccgagagcaggctggagcagccgcccaactcctggcgcgggatctgctgaggggtcacggtgagtctctgtgggtgcgggtcggagggatgcccaggtgcctcgtcgccccacggcccgggcggaggcgggtccggaacctcccccaagtccggcctcagcctggagcccgcgcgccttgggcggatgcacggactgagaggcgcttggctgggctctcagcccgccactgccacccggccccgtgcgctcattggtcgggatgtgtcggctcagcagcctccaacttctcccgaatcccactggtgagtcccaggagagcgagctgagggagaaaggtccaaagggcgcgagcgcccagggcgctgggagcccgtgggacgggcacggggagggcagagccagccgaggggagcggctgccgggaggtgcgctgagcagggtccgcagctaaggtccagcgcgatccgagcgcccaggaccctgcggccgtggaggaggcgtgccctgggaaggagccgctactgggacctgaagagtgaggggagggagaggggcccagagggtgacctggaggagggctctggaagtcacgtcaggttggctcttcaggttcatttccatagttccctgcggcctctgccttggggagttatgttttgttaccgagatccgcgctaccagattgcaccggggctgatttgggggctgggaatttgccattctgctgtacagacactgatttttttttcttctttttaaaaagcaaggtttgttttcattttggtttctgtcggattttctcatttgtaactcacttttctatttttacttttcttaaccggaagatcttttcattatcccacctcttcatcttgcttttaacctgatttcctattatataattaatgcttaaatctcacaagggttggtcggtgcggggctggtgtgtccttttgtagatgaaagtttaagacctcttaactggtttcagtctatttgtctggtttcaaaataagggtaattgcaaccaaatatccctctttagcttctcgatcaagtcgattcctcccccatatatgattcaaatggcaattttattaaactgaaaactagtacctgacttgcagcgtcagcatttggaaagtgcttgtcggcaaatcgactgtatgaaggcgtgtagcttcatcccctgccatttttgtgggttctagcactttaaaaaattgtctggtaatttcttggacttaaccctgtgtctttggttgtagagcagcactaaccaggggagtaatatggttggcacttcgtgtccagaactccgtatttcaggctgggaaacacctaattaatgtctgggaaacaagaagatgatttatcctgagtacctctgtcctcagcttctgcagacacagtttaaatatggaaactgtttctccttcttcctgtgcctcagtttccatagaacaaactgtaattgcatagcacagcttcaggaacctgcagatataagttaatgttataatgtgcagtgaagatgaaaactgcttagctaagtctaagtctgtaagtcaatgagatttcctttttaacaaatcagttatccaggtttcctgctttgactgtctgatatagtaatgcttatgctcaactggtataagaattgctgctttacattgctttgaaattaagcttacacttaaaatagtaatttattctgttggtaatattgtcgagctgaagtttgcaggttcttgttatcttagacctcctaattctctattctcgtctgtggcagtgtccacttttccgtttaaactttttatttaacacatcttcagttgaagtgaaatattttaagaatacaggtatgtttttgcgtaccctgctttatatgggactataagcctcaacttggtattttttttttttttgtattcttttgtttacttgtcccccttactcttctctatgggattgggtgtggttaagttggatattcaggtatttggggtttagtcatatgttccacagtgagattccagatactgtcccctgatgtcttaaagaaaaattgtgaaccttccagaattaactggaaatgaacgacaaagttaattaggagattaaacttgcatcatttctgcttttgctcaatgcttttgaaaaaaggctactaagagcaaaagacttcctttaagaatttacagggcatttacaagagggggagatggaggaagactttgcaggtgattcaaagattatattgttttgatgcagcttctgtcactgtcttcatttctctgtaactgtttctgcaaacttgggtgctgacccattaagagcccagctgcttcagtacccagtctcaagggtaaggaggagaagccaagggaaagtaacttacagggagaaagaaatgcttatccactagctttactacaccacaaggcatggagtttccacagagcacctgtaatttaaccctgaggctgccctggttcaccccttcgctttactttacagggacactgactgtcatttctaaggaagaactaagaaaaaaaaaagtccttttataccagtaaaacatttctctacattgtcttctgacatatgcggggggaacaatattcaggaaagggaaatactttagcaaatgtgcttaacattcaggtgttctttaggacagtcatgaaacatggggagactgggagaattattattgtttacctctctgtaaagtgtccagagtattattaaatttgttcccctctttcctttgcccaaccaatacactattaaaataggactacaatcaatgcaattccatatcataaccccaggggtggtgagactaagccagcatgccttacataaccattaagtaagacattttaacattcaggtacattacattccacttttatttagcagacacggttttcattgtgtaataaaatatttttatttgatagtctgtccttgcttatagcctcatgtaatcaaggggacagcatgtttaagactttgtatccagaactttaaggtctagctgtggttcgcttattaataattcactgggaaggttaatttctagttttctgctgggtctcccagaccatacttcaaatgtagaatatgtttcttctttctcctatgcctcagtttccacaaaacacacccttagagaattgtgtgtgttcaacaaagatctttaactataagagcatttctgagccgccacttcatcctgggaccaaattctaagagcaatttgtattgagctataaacagctaatctgctagtttaagatgttcttttatacagtcatgcagaaaaatggaaattgtgtgttctaatccttggagactggctgataaagtgtcactaggcccctgatgaaatttaatatttaggcttatatccccttaattttccccctaaatttctacagtacgcttttactgcatgatgatacagctttattttgaacagtgaccaaatgtgttctttacaaagaatattgacgagttgtgtagtcttgaacacgttgcctgacttctctgtgccccagtttcctaattctttattctattctgtggcagtgtccactttttggtttaaagtttttaacacatctccagttgaggtgaaagattttaggaatacaggtatgtttttgcataccctgctttatacaggactacaagtatcaacttggtaactttttgtactattttgtttacttatcccccttactcccctcttaaatgggattgggcgtggttaggttggatattcaggtatcttttggtacagtgagtgaccattttcagaatgttgtctaaccagttaatagatactggtatcagtagtagtagtaattttgaactgtaaaaataaaggttgtttttatgactaaaataaactacttcatgtgttcattcgttttgctgtttatctatattaatatttcaaattattgcttagtcaaaacctcaaggtattagtcactggtttttgagcttataaaggaagccactggagcaagatataaaattaaccattgatgttagtccagagttcaaaagggtgagtttaaaactttcttaatgatggtacagcaattatttgcttataaactgctgaattaatcctacttgagtatttaaccaagtcttactgtctaattttgctgagattttcagtgatataccaaagcaaaacaaaacaaaacaacagcaacaaaaaacaaaaggttgtgactgagacctgtcaaattcatttggctctatatactttgcattcagcaacaaaattttgacttctcaacagcaaaaatgtatttctattttaaaataactgagccttttacttttatccagccacattaagcatttggacattttcttttttatttatttgtttttcattattagtattttcattttttgcagattttaggtgatgggcaagtcagaaagtcagatggatataactgatatcaacactccaaagccaaagaagaaacagcgatggactccactggagatcagcctctcggtccttgtcctgctcctcaccatcatagctgtgacaatgatcgcactctatgcaacctacgatggtgagttactcccacacctgtgcatccataagtgcaaaagagaaggaaatcttcctccatgcttttaccatctatccaacgaatgtgttaaggatagaggcacttaaagactgacaaagagattcatttataaaatgtaacatcaatatgtcaaaataattaactttgaagtacggtgccttttatgtttgagctaagttattaattgcaagtatatttagtgcgctcacgcttacttatgaggaatctaaagtatggttttatttgattaaaatatacacaattttatggccagctttagtaatagtcattagtcaacttttgttgtgtcattgaaattctaaacggcttcacaggaatttaacaaatttaatttgagtcttggaagttttttacaacaaggatgaaaaaagattgattgtttaatggttaaaaaaatgattaccaagcaaaaacaactgattatttcaatttaataggcctggggcttcgttggtagagaagatataataacacatttttcttcataatcaaaattttaaatttagattttacttattttattttcttatattttttctaaccactgacaatgatatataatgttcagtttttagttcttgctttaagaaattgcttatttaattggcagtttttaaaagaacaaaagaaaaatagaaatttaaaaatttgtgttgccaatatttatgtatattctctcctttttctagatggtatttgcaagtcatcagactgcataaaatcaggtaagaaatggtttttacgtgtaatagttatacaactgatgtataatatttaaaattaaatgctaatcttaatttgctttgtttacacttttattcattgtagatcaattatttatgtgtctggctctataatcaatggaaataaaaatatatttaagtagtagattaattaacttgtttactctgaaaaatatattactattttcagccctgggctgtatagcagggcaatagaaaactatatcgctatttgtatggagcttgccatgtagttgaagaaagaaaatgaacacatatgaaatggtaagtttcgtatcattgtgttaaatgtctcagtgcacctcactaggtgggtgagaagaagggagtgagatgtaggcatgtaaatctaggtggagaagttaaaatctgggaagaaatttcattttatttattttttttattttttatattttgagacagagtctcgctctgtcgcccaagctggagtgcagtggcgtgatctcggctgactgcaatctccgcctcccgggttctagcaattctcctgcctcagcctcccaagtagctgggactacaggtacccaccaccacgcctggctaattctgtatttttggtagagacggggtttcaccatattgatcaggctggtttcgaactcctgccctcaggtgatctgcccccctcggcctcacaaagtgctgggattacaggcgtgagccaccgcacccagccttaaatttgggaagaaccttgaagcagggctagaatttagatgtggcggtgcagaagagggaattccaaacacaaaagaaagaaactatgttattgagaagtagtaaaagtgtacgcttgatagaaggacacattatggagaaccttgaaatccatgtttagccttgatattgtaatacaggagaaacagatatttttgaacagaggagtgatcaggccaaaggtgaaagatgattctgcgaatgtgaggttgactggattgagtgaaaaggagggcaggcaggtgggggctgcttctgtactccaagtgtaagctgaagaggttggcctgtggtgagagaagagtactattgagataatggggagggagaattgggtgactcagtagaactgacttgctaaataaaatgaatgaattgagaatgatgccaagttttaaaacccaagggactaaagagaatggaggcagcccacacagaaatagagaggttatgaggtggatgtggatgtgtttggtctaagatgaaaatagacaggaggaaggtagagatgaggtttaagaagctggaatttggatttgagatctgtcagtttaggagtgatagtggaagccttggaagtatttgagttctcaaaagaagagaagaggttcaagggctaaacttaagaagaggttcaagggctaaacaacatcaatgattagaagagaagaaaaataagtcagagcagaaaacagagaagtgtatgaagctatataaatcccatcaattggagtgtggtgaaaatgggagtatttcttctttcttcaagaaaaaggaaggtggtagctgagggcagcacctgggatatgaacacaatatttgtgtcctttaacaagagattctaaacctcctttctaacatctatgtgtcttataagaaataaataaactgttccaaataattttaaccattttctgctggatatttttaattttatttatttatttatttgaggcaggatcttgctctgtcacccaggctggagtgcagtattgtgatcacagcttactgcagccttgatctcctgggctcaaggcatcctcctgcctgagcctcctgagtagctgggactataggcacctgccaccattcctggctaggttgtgggttttttgttttttttgtttttttttgttttttttttttgtagagacagggtctcactatgttgcccaagcttggtcttgaactcctgagatcaagcagtcctcctacttgtcttcccaaagtgctgggattacaggcatgagccactgcacccagtcttggatattctttacttggatttttgttattcactgaactttgcaaaaaaatgacgggaaaatatctggcaattctaggttatagtctaatatcctgaatctgtgccctttggtttttttttttttttgtatcgttttttgatggatttttttgctctgggtcacaagagcaatgactagacaccctgagatgtgatgtggggagcgtgagggagacttgatttagatgttagccatttgctgctcgacatagtaagtttttcccaaaaacgaagtttctttattccccagggaaatggctgcacaggtaccttggctgggggatctccgtggtcatgtgcaaaagtcagcatgtgcccaagttgtcaaagttaacgtttacttcctccccagatcctcctatgcttcctctctctaccagctaccctattatatgctcaggctgtcctgtttcgggaaacttccacttacatattgactactaagggttaattcctctgtctttaatacacttgacatgtctctttggtatcttaatctatagattctctcttctctcactatttttcctttttctcttcttttccttgaattttattttcgaagaaactggattttttgactaggtaggtgtatttctataaacgacaagtgattttgcctcagagatctaggcaggtttttcctcccaaggagcaatgtgacattcagaatctggaatcttaaatgtgacttaatgtttagagataggatttttaaatagtgtttggcaagtctcaactcactaaaatgtatttaacctgtatcctttaattgtagcttagaaatcaaaccaaatgtaaaacaccttgcaggatgtatcttggcagagaaatgtatacaatagaaataacttcagtggtaaacaaggttgctgtatagctgtatatttttcttcattctgctctgttggttcacaagccattagaatacttgttcacattggtagttactattcttcctaggagaataaataagatgacacacaccctcatggatacactctgcatactcataaacacacacactcgtgcgcgcacacacacacacacacacagtcttctgctggttaggaaatcttttctgccacagaaaaatacaactatttcttttagaagttgttgcaaattaggaaaaccctagaggaaatcttggacaaaagcaagtattaaagaagagtggccagagtagagtagatggaaagaaaaagaaatgtgaaaagagaaggctgggcacggtggctcacgcctgtaatcccagcactttgggaggctgaggcgggcagatcacctgaggtcgagagttcaagaccagcctgaccaacatggagaaaacccatctctactaaaaatacaaaattagccgggtgtggtggcgcatgcctgtaattccagctactcaggaggctgaggcaggagaattgcttgaacccaggaggtggaggttgcagtgagctgagattgcgccattgcactacagcctgggcaacaagactgaaactccatctcaaaaaaaaaaaaaaaagaaaagaaagaaatatgaaaagagagatgttgaaaaaatataaaatatcttaccagcaagtctataggtcactttaagagagtgggtgggttcaaacctgagctcagaaattcttgagaatgggaaaagcaagtattgacactcagggtgcttacattatatgaaagatggccccaacttgaacctttcttccagtggaagggaatgtcatagcaaatgtacttatctttgattctttgaagtcaaggaatacagaagtcaagccataccaagacagaagtaaaatattgcagaaggctgtttcaaatctgtttggtgttacatatttaaaatctgagcatctaggatttaaatatttatgatgtacataaaatgatgtttatgtatactttaaattaacttgcctatatgtgtaatgcatcagtatgaaagattacaccagacctaaagtaaaacaaataccacttaagaaataacaacttaaggcagggatcaaaatgcttcaaagtattattcatcgcttatttaccctataaggtcatcaaaaacttagagttataaaacttgtatgtgattttgcagacttttccgtgtaagtctgaatcctgaaactgatttccattgcattgtaacctccctaacttagatttcaaggaatcttgtgctttaaatcagggtttctcaactcaatcactattgatatttttgtgctagataattcttcgttgtggatgctattctgtgtattataggatatttagtagcatccctggcctctaccaactagatgtccagtagcagtcctctcctagttgtgacaaccaaaaaatgtctctagccattactaaatgtcccctgcaggcagcacggtcacttatgactgggtaccactggtttaaacggtctcaagatgttatcaatgcttccctcttaacggtaggcaggataatggcctctcaaagatattcacacccaattcccagagcctctgaatatgttgccttatatggcaacatgcctgtaatcccagcactttgggaggccaaggcgggtggatcacttgaggtcgggagttgaagaccagcctggcctacatggtgaaaccccatctctgctaaaaatacaaaaatccaggcatggtagcacgcgcctataatcccagagggaggagaattgcttgaacccaggaggcagaggttgaagcgagccaagattgcacgactgcactccagcctggaagacagcgcaagactctatctccaaaaaaaagaaaaagacaacagagaattgaggggtctgcagaagcatatgttagaagtgtggtcctaaattatccagaggccagagaagccaagctaagacgtgatcaatacagtttacaagagaaagtgggaccacctccacctgtatagtcatgcaggttgtacactgcatatttgtcgatggcagccttgacagacaggcttgtggaacatcaagacctggatgaaacacctctcagaactgtccactccttttattttaattctgcacataccaagaaaacttttgatgattacttaattattaatacaaggagaggtggcattctgttacttgaaagatattttcatcatggtgagataatgcacagcggtccccttcttatcctctgaggatcccccaagacctcagtggatgtctgacactggactgaaccctatatatgctatattttttctgtatacatacctatgataaagtttaatttataaattagacaaagattaataacaataattaataaaaaataaaacgattataatattattccagcatcactattcttatggtttggggccattattaagtaaaatagggttacttgaacacaaacaccatcatcctgcaacagttgatatgataataatggagaaggctccttcgtgactttcatcatgctactcagaatggtgcgtgatttaagacatatgagttgtctgtttctggaattttctatttaatatattggactgtagttgaccatgggtaacaaaccatggaaagtgaaaccacagatatgggggagactactgtacgcacatactgatttaatcagatttgtgtgctttgagctatgaccctggaactgaaatgaagcttgcaaatgtctgcaagggccagatcatggtgatgccctaggtgatgcatcttggcaacagctagccttctcctggctgtcacaaggcatctctgccttcttgcctgttaacaccttgaaacctccatgaaggaaaacagcacaattaggtaaatacaggaaggactgatggctaactcatgggggctactggccctgtagcagccttttagtgtaggaaatgaggctatttcattatgtagttaagtttggaaaaaatccttcatggaataagaaagcagcagacatcttagtaggaagaccactgaagcacacctttgttaatttaaatgtggcatgtggcaatttgctttgtgtggcttccctggcacaattctcgtgaaaattgtgtagggatattaccttacatttatccagtcaaaattagcatctgtcaatcagatcctttccaagaaagggaatcagttatatcataaatacacaaatatataacatgtgttttttaccctccagggaaactttaagcaagtagtacaccatcattttttaatgaatggtcaagaaattgaaaacatatataagttgagttaagcagttaaagggaaagacaattagcaatgcctggtaagctaagtggtactccaaaggtttattttatagctacagaaattatctacatgtagagggggtggatacaaactagcttagactggggtgagaatcctggtttgacatttaacattttagaataagagatatagaaagattcctctgtagttgaaggatcctgttttgtcctactcataagcaaatccatggggtagcaaggtgctttctggtaagcctttgatatgatatgaagctcaagttgataaaacagattaattgaaggaaattgaaaaatacgcaatttaaaaaaccataaggagaatgttgcacaagcttttgaatcctgtaaattttcattctttaagaccattcagaaaaggagattttgtcgggggccagtggtggcttgttttgatcctatttctgaaccagctgaaaactagaatacgttctttctgttcaaaacatcctagatgggccacatattagtcaggccttctccagagaacagaaccaatggtatatgtatataaagtctcagtatccaaaggcccaagaacctggagttctgatgtctaagaacaggagaaggtggatgtcccagttccagaagaaacagaggatttcccctccctctgcctcttgttttatctaggccctcaacagattggatgatgctcagccacaatggtggtagagtgtggatcttctctactcagtccactgattcaaatgccactcttttccataaacatcctcacggatgcacccagaaataatgctttagaaataatgctttatcagctatctggatatctcttaacctggtcaagctgatacctaaaattaaccaccacaggctacagtgaaaaagatagttccaactgtgagtgaggatgcggagaaactgaaccatcatacattaatggtgggaatgtaaattttagtacatctggatcaacatgttagaaacattttgaaaaacagtttgataatttttacaaaatgttaaatatatactttccatacaacccagcaattctactcctaggtgttacttaaaataaatgaaaacacatatcctcacaaggacttcattacagcataatgctgtttttataaataatttataaaagccaaaatatggaaatatcccaaatatgtattaacaggtgaataaacaaaatgccatatagctataaactacgataccacacagcaataaaaaggagcaaactactgttatgtgcaatggtgtagataaacatcaaaaacattatgctgagtgaaataagccagacacaaactgcatattgtaaaattcaatttatatgaaatttctataagaagcaaaactataggggcagaagacaaatattggttgcctgaggctggagatgaagcagggattggctgcaaatgggcataaggggacttcttggggtaatggaagtgttctaaaattggactgtgacaaattctcagctttttggctaaagatcaagtgtaaattggattgtggtgatggttgcacaactgtgtaaatttaccaaaaattaatcgggtgaattttatggtatacaaattaataacccaaagccgttaaaaaaaaaaaagcaaacaaaaattcaccttcattctttcccccatctctccaatgtccatttttacatagttatctcatgttttgatcttatgcttgctattgtatgttgagtccattgagctccatttttgcagtttaaatgattatatgtagttttcaatgtagttttcaaatcttcactaaataaactcaagctttttagtttgagtgagcctctattatttaattatattagcaatatattgacgaaaagtctctggaaatagtaaatcaactgggaagttaaaattatttcaggattaggtgttggaagtcctgttttcaccccctggggtttcacttacagaggaagtcaaagacatatgtgtccaggtgtaccagccatctggatcaaagccagaccacttggtctaccacagagcagttagcagttcctgcttctggaaaaatgtgttggtttttcacacaggtgctgcgagatgttttccttttcaccttaactgatagaaagtcaagagccaggacgggcgttttggctcacgtctataatcccagcactttgggaggccgaggcaggtggctcacgaggtcaggagttcaagaccagcctggccaagatggtgaaactctgcctctactaaaaatacaaaaactatctgggcatggtggtggacgcctgtaattccagctactcgggaggctgaggcacaagaattgcttgaacccaggaggtggagtttgcagtgagctgagatcttgccactgcactccagcctgggcgacagagtgagactctgtctaaaaaaaaaaaaaaaagattgaaaaaaagaaaaaagaaaaagtcaagaaccaaatttgaatttaacttgaaattgtaggacttctttgtataaacttgcttcatcagctttattcctattcctcttttctttctcatacaatgtatattagtttattttatgtatccctctaaggccactttgaattattttaggaagaatgtaggttaataatcagatgaatagaatataaattccaacaactgatatgtgcaggagaagggctgttaaattataaactttatttcaaagagatgcaagtgttatgagtaacggaggcacaatttttggaagcttactgcttctttttccactaagccaacttttagcatgggagatctgggatgtaagttttggccacatcctgtgtgattggtatgagatcctaattaagtcagttcagctttctgcatttcattttcattatctacaaaattggaattgaaagtgtctcattttacagggaaacagcaaagactaacgacagcctatttcatgttacacgcccttcagggagatgcaccataggtataatgcacagataggattcatagacatcttatttcatgaaaattgcaaatgcactatttaaaattttttattgagaatcaaataaaaatcaaatcaaaaggcgaacagtgtatttttaaagaggaagttgtagccagaaacagagagaaagaaaaaagagaatgtggtacattttacatattctcaaataaaaatgtgtcatcctttatgaacaacatttgatttgattgctgtgctctgtcttagtatgggggtgacagttcaggctttgaatcaattagaatgagcacaatcagaaatgaacacttgaatctgtgtttcctgtaaagaaaagcctaccatcagggacaccttagtttgtaaacctagctaatctgcactcacccttgccagtaccccttttctcacctctgattaatcccttgaagtaagtaagtcagaggtctgcatcaggagaatgactagatccttggtattcaatgcgtggtccatggaccaacaacagcagcagccactgagaatgtgcaaaaatgcagtctcgggctccgcctcagacctactgaatctgtggctgcactttcagtagcctcttcaggtgatctgcaaaataaggttgagaagcactgaggaatagtgattttcaaatatggctgcttattacaatgatttgggaagcttttgaaatgtacccatactactaaaccttccattcttcctgggcacacaaagtttccatttcttcagtggagtagtttctgttatgtgttaggaggaaaagcaatttaagtaaatgaatagatgttaaggggtataggaattgcctggatatttgcatttttaaaagaaggtacatattgaccaactgattgctttaacaggttcaatttcagactgtgtgctcagtgaagactttaagttagagaggagtgaagactttaagtcagagaggagagacactgagcctgattttctgcttatcgtggacaagctgaacctggaatatcttcctaaatttccccagtgtaatgcaggcatgctatttctgtagagacattagaacaactttttgcctcttccattcattcatttattgatttatctattcattagttaattaattttattttttattttttttagaggcagggtctccttatgttgcccaggttgacctcaacctcttgggctcaagcaatccacacgcctcagcctcccaagcagctagaacaacaggcacatgccaccatacctggcattcatttttttttccacaaaagcattaatcaagcagcttctaaacattgaacactagacattggaaatatgaactaaaataccccctgccgtcaggaaaatgaaaacctggtcagtgtgacagacataaacaacattaccatatggtttgataagtgctatgatggtgataagatttgtgtgctacaggtgccctgagagaggagcacctaaaccagagcgggtctgggagtgggcagctaaagtgatagcaatgaggccgggaaagcagtcgcacttcaccagctaagttctgaaggataattgaattgcccaaccagtgggagcagaggagagcatgtgcatagtctgtatgcaagatggaggcaagagctcaggaagtttaggacctactagtggttcatgatggctgggatgtagaagctagcaagacttgatactagagaagtaaccagggcccaggtcacacagggtcttatatgccatgataaatgggttgcattatctcccgaagtctacagaaaatgaataaaattaaaatgccgcaggggacatctaagggattttaaatagggatgtgtgacattgtcaagattggctgctgtctagctcaagcctggtaaagtggaggcaaagatttacccaaacaaaggaataacattttggtgcccctggtgtgtgagagagcttggcaatattgagaaactgaaagaatatctgtaaggctatcatagagggtgtgtatgaagatatgagagtggaggcaaggagaagtgttcactattggcaaaagaaataagcaggaattggattttgtagtctgtgttaaagtgaatgcacttccttctagtagcggtgggaggtcacagaaggaagggttttaaatgacgcatgactttatcagaattattgagaaagatcactgaatagaaataaagaatggctgtgggcaggaaattgggctactgcacttatttggatgagtattatggttgcctggatttgaatggcaacagtttttattgttgttgctgttgtttgtttgtttgtttgttttgagacagggtctcactctgtcacccaggctggagttcaatggcacaatcacagctcactgtagcctcaacttccccagactcaggcgatcctcccacctcagcctcctgagtagctgggattacaggcatgcaccaccacaccccgttaagttttgtaattttctgtagagatggagtttcaccatgttgcccaggctaagaaatggacagatttgagaaatatttactgggaagtagaattcataaggcacaatgtttctgtaaataggtgaggttgtgaaaaggaagtgaggaaaaggtaactcaagtttctggcttggtaaattgggtgataagtcagctgttcaccaagctagggagcactgaagcagagcttattgggtaataggctgggaccaatgcagtgaagagttcactgtgagatagtttaaatttgagatactggtacatattcgatgtggtagaattcagggaagatggtgttggaaataaagattcgggggtcatcagcatgtggatgatatggttgagatttcttagggaggaaatggagaagagaacccagaattgcatcacataaagcaacatttaaaaatgagaagaggaagaaactccaaaagaaaccgagaagtaatcagagaggtagaaggaaaatcagcgaagtgtaaaatcaccaaagcaaatggaggagcagctgtccaaaattagagagtgatcattggaattaagcacagctgagaggttgagtaggctaaatgttgaaagcagaaaggaagacattgaagattcaggtgaagatcaggtggaaaattgatggattttgtccagaggaagtaaaagaggatgtatatccagagaaaagaatataggatgattccgagataaaggatggcctcctcctcccccttttatttaatactagggagaaagaagccaagatggctgaaatgcaaacatgtttggaagctaggagggacaggaagttgaatgggtcatcatccagttgcctttgtgaagtaacaaacaaaaatctccgcctgggagtgagctggtagagaaagtaagtaaggagagtatgaagactggaaagtgtccatgtgaggagtgggccatgcacacagaactgatggctctgttgaaatggaaggctataacttgaaatggcattaaaccaggcagttgtggggtttctccagcatcaccgataatggcttcaacagatattgtcagcactgttttagatgctaaggatacttagcacctaaacgcagagtgagcaacacaatgtccctgcttacaggagcttacagcagtaaaggagacagtaaataaacacacacacatataaaaaaacattattagatagactagagttggaagggaaaaggaaggcagctggatcaattcagggtaggctcatttgcagggggcaagggaatgaaatactttggtgagatgatggtttcagggatggcaccacaggatgtacactggacagaagatataaaagaaaagtaaagtaaaaaatagagtggctggctgggcgcagtggctcacggctgtaatcccagcactttgggaggccaaggcaggcgaatcaccaggtcaggagatcaagaccatcctggccaacgtggtgaaaccccatctctactaaaaatacaaaaaaattagctgggcgtggtggtgcccgcctgtagtcccagctactcgggaggctgaggcaggagtatcacttgaacccaggaggtggaggttgcaatgagccaagatcgcaccactgcactccggcctgggcggcagagtgagattctgtctcaaaaaaaaaaaagagtggccatggggtgagagttttcagtgaagtcgaggaacaggtgtagagggaataaagaaatgaaacaaacaaacaaacaaaaaacacttctaagaatcagaagattcttattggagaggggggttactcgagatgaagatttcagaggtacaactgttctgggtgatgagaacattaagatgtcgtcatgaaaatgtgtagactaatgtgaagtgaaggtgaaagttaggagagttcagatggtcaagaaattcttaagctagagtgtagcagaggttgtccacagggtctctgatgttacatatcaagatggtagaacttatgtggaagggcagactgcacaaagtgccagagtcttaaacaagcagagatgaatgcctctggagtcagtagaagacagagataaagtaggtgaggcggggatggttgactggcagaagcttaaataagcagagtggacagtaaggatttggctattgcaccaagtgataacagaaaactagttttgcttttccatgttggggcaaggtggagggatatgccacctgatgggattagttcatatggattagtattttcagtacacgtgttgtcatatgtaattatcactcaaaagggtaagcagcaactaataagaagaggtgctggagggccacctgtctggcatatagtgtgggattccatttgatacaattacaaatgaattcatttttactcatttttatcttttcactatcctagataaaaactcaaaatgaatcaatgagttcttatcttaaaacaatatgttctgtttaaacatttctcagcggtataatcttcctttaatcttacatttcttcaatccagaggagtccaactacagtgccttcaccgtgaagctaatgaaaagggagttggtccactgtgtagactagactagatgattgcgaagttaaattgaagtaattgagcaggtacccaatagccagcagcggatttgtttctctgttcttgatgcttaagtaaaaacaagcaagccaagtattaaatggtggagctcctgacaacacagcttcataaaaaagaaactgcttgactcaaggagtgtgtccttgcgatagtttgccgagaatgatggtttccagcttcatccatgtccctacaaaggacatgaactcatcctttttatggctgcatagtattccatggtgtatatgtgccacattttcttaatccagtctatcattgttggacatttgggttggttccaagtctttgctattgtgagtagtgctgcaataaacatacatgtgcatgtgtctttatagcagcatgatttatattcctttgggtatatacccagtaatgggatggctgggtcaaatggtatttctagttcaagaaaaccgaggcaataccattcaggacataggcatgggcaaggacttcatgtctaaaacaccaaaagcaatggccacaaaagccaaaattgacaaatgggatctaattaaactaaagagcttctgcgcagcaaaagaaactaccatcagagtgaacaggcaacctacagaatgggagaaaagttttgcaatttactcatctgacaaagggctagtattcagaatctacaaagaactccaacaaatttacaagaaaaaaacaagcaaccccatcaaaaagtgggcaaaggatatgaacagacacttctcaaaagaagacatttatgcatccgacagacacatgaaaaaatgctcatcatcactggccatcagagaaatgcaaatcaaaaccacaatgagatatcatctcacaccagttagaatggcgatcattaaaaagtcaagaaacaacaggtgctggagaggatgtggagaaataggaacacttttacactgttggtgggagtgtaaactagttcagccattgtggaagacagtgtggtgattcctcagagaaataattttaataatgtttgagtgaatcaaatatacaaatagtattgtgatgcagtgtacccacaatcattaactcaactatgaattactcaaagcactgtagataatagtctagcaaggatctgacaatatgttgagaagaaatgatgcacatgaaaccttgaaagtcaccttaaagaaactcatatcatgcaaatatgaatattttaatagctactataaaatagtagagctgagtgctgtggcacacacctgtagtccagctactcaggaggctgaggcagcaggatcacttgagcccaggagttggagattagcctgggcaatgtggcaagaccccatcttcaataaataaataaataacttagtagcaattggtgctatgaaactttttgatgtagcttggatatttgtcctcgcccaaatctcatgttgaattaatcctcagtgttggaggtggggcctggtgggaggtatttggatcatgggggcagatccctaatgacttggccctgtctttgcaatagtgagtgagttttcatgagatctggttgcttataagtgtgtggaacccccccacccactctcttcctcccgttcttgccacgtgagatgcctgctcctccttcacgttctctcataagtaaaagctccctgaggcctcccaaaaagcagatgctggtgttatgcttcctgtacagcctgcagagccatgagccaattaaacctcttttctttataaattactcagtctcaggcatttctttatggcattgcaagaacagcctaatacattttgcatggtgcatatcaactatggtaataaagtgaaaacaaagaagtgggaagctttgaaaagttgacaaattggttgagtaccatatggaactccagctgtaggatcagtcccattccaggcccaggcactcactggggccaaggtcagtagctcaaacattccacttccagtcagccctactcttggtgatctgcctctgaccccagctctagtaaatgggtttctgccttctcccatagggatttcactcctggctcattccccacttctggaaaatgagtttctttttttcttttctgtcttctgggactgaaatctagcttagctcttaacctcatgaccttttgccagaccacggagaactgaagtttccttggatcaacacacaccatctgctggttatagctccctcctcacagctgccgtgggtgccctccctgtgtgacttatttctgttgcttgtagctgagaacttcttctgttgatggtcctttatagtttaactaaaccgggattcagtctcactgggctagtcaaaccacttctaccagagcccagtttatgtgaatgatgaatgttttacatggaaaaaaaatgtttcttcatttactgaggaaggagcaccttcactgattttgtatgccaacacagacagcgaaggatcctgcttgtccttcacctatcagccatcacacctattaggaggggggaattggtcttttgttttgtttatttagtaaaaggaaatctaattatatattaaaagttaaaaaaattttagatcctgcctacatgactttaaaatgagcaataaaagtcattttttattcagggatagtaacaggaaaaagaagctagtatcagaatgttttaagattccgatacagtgcatatgcaggttttagtttacaaatagcagatggtgatgatttactataagaaggtgtaattaattgagaatgaaggatccttttggagtgtccattatgggctagtcattgtgctaggcgtaggaattagaatcctttccctgggtgggggtatacttaaaattattgcttttgtattctatggattaccttgaaataccctttgagtcatttctcaaaaattgtgcatatcataccgatctgataactcattgcactgttgatctgaggcttcatcccctcacctaaccacatggtcatccattttgcagtccacaagagcccttcctggattcatggaaagaacttgctctcacttgggcttgagaaagcataagtcaacttggcagggcatgtgttaacaagatgatttagaactttgcgaccagccagaaccataaagacagcttgtaataaaagtaaagctgttctcatgagatgcccatgatgagggcttctagggcaaggctgctgtttcttgctacctcagcaagaatgaggtctctttcccatgatcatttccctccccttcactgggcagggtgacaaagaccaggcctctgctcccaccagtcaacaacaggcagggctcccagcatgccgaaaccttgagagctacctcttcctcctttatcccttcttcagagggtagcctacctgtccacaccggcagagagtcactctgcatgtcagtcctctttcggttgcctcttttgtcaaaaacgtcacctactttcactgcctgggacacagctcagaacctgactcaaatatttgttgaatggccaacggaatgaatgaattgccctctctcctctaccttcaactggtagctcccccttcattcccagagcatcctatacgctttacctataactcatatcccacttgttattagttgttcaatgtctggtttttgtccactaaaatgtaagttttgactgtttctattttattcattattctatttctagcacccagcaatgtgtaagttaccaataaatattgattgaataaatatactctcaggttccttaccttgaagtcacaaaactattgatgcctatgcaaggtgacttgtaagcatacctaatacacaaatatagctgcctcaaggaaacgttttcagtctagctaggtcctgcttatgtcagatttctcagttcagtatttctgtatcaagcctcctaggtttagcccctttctatctgatccatcttctttgctagcaataaagtcaattacgctcttctcagttgtctaattcaccttgctaattctaccctcctaagctagaactaggttaatgaggaaacagtttccggatgtgtttctatttcccactatttttctgtttaagggaaaatttcaactaattttctacttgggtgtaagcatttccagctctctaggagcaaagtctctatcagtctggtttttcttttccaactgtggtttgttctgaattcctcccttctcaataatttatttcttctctcttttaacactctgtgttcttcttctcttgaacaccattatttagctaagtgttgctgttcttcaacaaccaccatcctctaaaactcctctgtccctgctcacttcattcataacacacaaattcaaattcctagccagctcacgcatacatgcataaactcacttatggaaggacattacaagagactccttacctctaggttaggaggagctttacttatcaactgaatacagtaggagctttacttgtcaactgaacactgagtaagtttgagaattgaaaatgagacctgagcatcacaaaacaacctttcatatctagatatagttaccatctaggagttcacgtgcattataaaagaaatggtcttgtttaagatgaaaccctgcaagctctgtgagggcagggattatgtctgtttatcacaccatggtatgttcagttcctaagagtgtcgggtatatagaggccgtcaatatttgttgaaattaaatgaaaagtttcagtcttttcatgcttcacaagaagaaaatcttttggagaaagccaatgatttaacataatcttctggatcttctatgacagaaaatagctatttaatccgtaaaaaatataaacatatggagccaaatactgccttgtgccaatcaaatgtttggtttattaatagttactaaatttattagtgctctctagaaaagagcctttttagaatttgatttcattttaggcagcattcgagaagcactgtcgactcagctttcctctggctgttgtctttttgtaccactccctaaccaaaattgatgcaaaggcaggatgctttgagttactctcagtaatcacatattattgaagtcagctggttattcttgacagacaatatgatccaaaataacacaatgtttaaacagaaggaacatgggtgtggacccccattgctccctcttcagagatgtctgccagggtccagggaacttgggatctacctgaagagtgttactaagggaacaatgtagccttttcatgaccttctatagctttagtttaaaaaaggaacattatcatcatttgctaacattacaatcaacagcagatctgataactcattttaagtgatatattgtatttaaattacagtataatccctaatagctttttgccagcagagtctttcaggattcaaaatgcaaattgcacctgaaaaagaaaaattatttttagacttatggcactttaacttaactgtaacacagttagaatactttttattattattattattaatagaatatgtttcggttgcgaattctggaggaatccctactggaaaataattgccagtcctcccttggctgtgagccattcattgaaatggactatgagataagactgaagaatttcactaatttcgggagtgccaactgaagtttattattgtgaatccattagacatgagatttctgtgattatctcaatgagttctaaaatccaggtccaaatgaggtggaaaaattttatatgactatatacatgttatagagcaattaatattttaattgggtgtcaagaaaagcagtggttgctctataacttaatttgggttcctctgcctctctgtagagtttctgaaaatttttaaatgtcatttggagttaaggcagaatgatactgtggaaaaagcatcagcttaaaattagacctaggctcagctttagttgaattccttaaatttacattggtgacgttgagtttgtaaccaccccatacctagattttcttaaaataggagtaatatgtcctactttataaagcagttctaaggaagaaaaatgattagaacccaaggcagtttcacatagtataagatcccagacgctggccaccaggtttcttgagttcaaacccactgcattatcctttgccaactatgtgaacttgggcacaaatcacttaccgtcaatttctatatttggaaaatggggacacaaatatagttaccatacaaggttaaaagaaaacaaacattaaagaaagcatttaaaaaacagccatcatgaagttggcacttggcgtttgacatatgtcaagtgttggcttctattgttattattattattacatttaagcgtctttggctaaacctaaatgaaaatcctataatttacattgtatatttaaatctgatagtgaatttatctgatagcaaatggattctaggttgattattcatatgcttgtgcctacgtgtgtgtatgcatatttgttgtatgtataagacctatggatttaagataaattagtcacatgtatatatgaaatatagttataaactaattactccccaaactagaacagcaaaaataggtctccttacttaagagtacagctgtacagagtaaattcactatgcttggaaacttctttcatatctatttgtgtaagtctgcagctagtttctgaacagttgtatagtgatggtttcatggtactcaccaattagacaagtataagtcatgaccttggctttcttggaacgtaaccagtggttgacagggagtgtttgagttaaatgataaactagcagtccagtttacactcagcatctggtatcccccactctccatctttcttcaaccaaggcatcacaaaagcaatttgggggcaggcattttcatttaaaaatggagagtggattgtggaagcatcctgagtgtttgtaatgaaagccatttggtttttattagcattagagtctacgtgcttgctagttttcagtcattttctcttcaaaaatggttccccagattccagttttcacattgctgccttttgaattgaatcctttgtgacccgttgtgattacattgcattttccttgtgttcttttaaaaagttctgactttctctgaattgtggttggggggatggtgggaggagggtggcagcaagggaatagggtcacttgtacttttagaatgttgtcaaaagagatttttaaattgtcaaaaattgcctagaagtaatatcaagcttagtgtctgctaataaagcaaggatttacaacagaaggttcggtcagaaatgggtgtcctaaggtctttacaaaagagcatttgctcctgggttccccaacatttctctgacctctgttggacaattctagaacagttataaatcaggctaattataatgatgttaggatactggtgttgtgtgtttggggttaggaagctgagagcttaggcaatttgaagacaacaagctgaaaacagctttgttcatataccattccctaaacattaattcagtgcagattaagaatagtcaatggagggaccgggcgtggtggctcatgcctataatcccagcactttgggagactgaggcgggtggatcacgaggtcaggagtttgagaccagcctggccaacatggtgaaaccccgtctctactaaaatacaaaaattagcctggcgtggcagtgggtgcctgtaatcccagctacttgggaggctgaggcaggagaattgcttgaacctgggaggtggaggttgcagtgagccgagatcgtgccattgcactccagcctaggcaacagaatgagactctgtctcaaaaaaaaaaaaaaaaaaggaatagtcaacggaggaattttgtcatggcactgggggtatatatgtggtatgtatgttgtaaatagatgcctaacctatttaaaacgtggctaatttatagtgaccaagagtttttaaaatagagtagtaattgagaaagaaatggtttgtatctttttcccacttaattttctttcctgttttgtacatttttctagatgcttcaaaaagacccaaagaaaagaggaatataagcacagtcattactcattatttgtggattctctgtttgctaattcacctactccctaaaatgtatttattacccccaaatcactatttgcagctctctcacagtcatttacagacatgcacagactggtgaaaaaactttgagtctttctacacacatgtactcagctgagattgaacaagggaactatagacaaggatcctttttgtagtccatttagtcaacgttttttgcatttttgtgctttttaatgatgatttcactgttaaaatgctccacaaccatagtgtggaagtgctatgtagtgttttgaagcacaagaaggctgtgatatgccttacagagaaaatatgagcaatggataaacatcgttcaggcatcagttatagtgctgttggtgtgagttaaatgttagtgcatcaacaaaatatattaaataaggtgtctttaaacagaaacacacataaaacaaggctatgtattaatcatctgtgtgtccagaagcccacaggaacctaaccttgtatttcccctagggtcaatgattcagtattcactaattcagtgtagtagggactttatatagaacaaaactcatataaataactagaataaaccacacttgttttttaattcctgtgaaataattcatatgggaaaccatcaaagacctgctaagtaatgatgaacattaaaaaaattaaactgggccgggtgtggtggctcttgcctgtaatcccagcactttgggaggccgaggcgggtggattacctgaggtcaggagttcgagatcagcctggccaacatggggaaaccccgtctctactgaaaacacaaaaattagccaagcatggtggcgggtgcctgtaatcccagctacttgggaggctgaggcaggagaatcgcttgaacccgggaggcagaggttgcagtgagcagatatcgcgccattgcactgcagcctgggggacaagagtgagacttcatctcaaaaaaaaaaaaaacaaattaaacccatataatagtactacagcacaaaactttatgctatctattttgttcatttgctgtttgtgactatcatatttatgtcaactttaccctgttttattgacaagtacccaggagcacttgaaaatgtagaaattcctttaaaccctcccccctccaccagaaaacaagcctccagggaatgcacatatataaatattaagatagttgttgtgtatagtgcccaaaatcctattttcagttagcaaactattggtaatgttggaaagcaaggcatccagataagaaaggggagatcttgtggcttggaggccattcaaaggcagacttaaggttgcgtcttcttaagggagacatgtagtgggggtcccgtgtaactggaatttcaccatgtctaatcgtgtctagcagaccaatggaatgctgtgcctcaagtttcttctgagaggcctatgagcctcatgagatatcaacaaaaatgtttcttggccatcagaagagagaagtgattttgaatatagtatagtttttgctattataatcactccaaaaccaggcctgttggtgcttgtggttcttgagagaggaggccatggggggtgaaattcaagagacctgtttacctataggcacaagagccctcctcaagacttgagacaatgaaagatgaggaagggaggtattttccctgcatcatccagcttcagcacccagcgggaactggatcatgggtggtgtctgggtaggaggctgtggaggctaaagtcagtggagcagagtggaagccttggggtcgtgggcttatgcatgagacacatgtgaggttccgtgcaacactttaccagccaattataagggactgaagtcactgcaaaacataggttgccatgatgtaagcccatttgcatttgcagactgaaaaggcaaaaggaaatattcctgattcaagtaagtatgggactatacttttttgatattggatctgttggtcctcatttctatgtttctcgattgtctaatgtggtggttccccctgactgcacattagacccactctagaaaaccttaaaaaaatgtctggaccccctccaaagattctgactgaattgatcaggagtagaattctgggcatccgtgtgtctaaaaggcttctcagatgattcacatgtttagccagggttgacaagtactgtcctaaaacatatttctgagatttttcacactccattttccaatgtgctccaaagatagcttaggcaggaaccctgctacatggccacttcaaaaagatgcacccctgcatgggcctttgagtgcatccacctagcgtggcctccatgccacttccctgtctggttactccactataaaaaattcatccgcggactctccaagtcctcaagctgtacattgtcctgcctttgtcccaacaagaattgttggtgataagtccgacagtggagaggctgtggctgcagagtggcaggaaagagagtaagtaaaggagaagacaggacaaaggaagagtaaaagggtacttgaaaaggactggaaaggagggccctgcaaggtgctgcttctcacgtgctccccaccagccttctgcattcaaagcagggagggaagagtgtgggctcagagccatacatgcttaagtgcaagccttggggccccataatttactagctgcttgatcttggaaaaattacttaatcttgtacagctaaaaagtggtggagctctgggattcagaactggtctgtctgggttaaaagagcccaaacgtttttcccagcgtatactacatctcccaatccatacacacacaatagacttttcagtgaggaatacagtaattaataacttcccagatggtagttgaacttgcttttaaattcctatagtcaaataagttgggagaatgttacaagaagattagttagaaagaaaatggtgtcatttattatcagctcgaaacattcagaattgtcatttgtaagaaataagctcattattaatagaagattacttctcttgtctttgtgtgaccattttcttaaattaaaaataacttttttcccttactgcaaaagtaatgcatgttcatctaatacaaattggaaaataaaggtaagcaaataatacaaaattaaacacactcttaatccctccgcccagatctaactgctgtaaatatgttagtatatatccttctagattttctgtgcttttatacagattttaaaaaatcatagtatatgctctttcactttacaatatctggtcaacaacattccatgtcaatacatttgcctttactacattattttttatatctgcttattaaggtgaacaatttagtctgattttaaaccacatttgtttactcagatgtcagagatccacagataaggaaacatctgaagagcccaggtgtggctatgtggagaggttgagtaattcaaaacaaagtacaaaacataaaaacaattacgaccagtttgacagttgtacgtctgtttcctacggccttctacccacaagtctaccgctgacttcaaagaaaagtcagcacagaggaggtccagaggataaggtgcaaaacgagaatcaaacccacgataagagattaaaggaaggttgatcaaagacccagcataaaagtgctagcccgtgacttgccttggcccatggccccaaaatattcatcagaacagagagcgctctttgaagtgattggatgcatccatgctcagacaagctcggtggtcaaagggaaattttaaagagtggccctggaaggagttagcaaagttgcctcttcctctctctgctctgcacatccctcacaaactgaatgttatttctttggtttgttgtgcagatgcaagtaatttaactgtactttttgccccctgggagatgtgggaagtacagttgcttttacaggatggagaatttgcactcatgatcagagaactgaaacttccagccatcctttttattcagagtgtttaaggaccggtggtatttccaaataggcagtagggcttgttcatgctctgcttgttcattctgcttgttcattaattgttcactacttttctgagtagagttcattgctctgtgatgtcgtgacagaagctttcatttccccagaaagaggaagaaaacagaagtgccccctccaaatggcatagccttcacaacattcagtttaaatgtttttaagtatcttaaaagagaagagttatatattgctaagtgtgttcttagaatgtctgtagttagcacttctttcaggctctagttttctggtttttcactttacataataatcctctatgtatttaggatctttatttttcacctttcccgttaccatatttttatttccttcaaaattcgagggaattgctttttctctctaccttttttagatcagtttcctagtctttaactgaggtgttaaagttggagtttttactggcaagtcttgactgagcacagtgttaggctctgtgagagagaatatgcattttctattttcacagagccacagtccaggtgaggagataatgaatttgcatgcgaaaaatgaatatgttgtgagctgatacagacttttgtcaggccagtctttcataaagaagtatttggaatgggctttgaaaatgcctgaaattccaaaatgaaataatatgaaataatatttattagtacgtataggggctgggtaacatgctcaaagttacagaggcagaaaaccataaggtgtctcacagaaactgaatatactcatttaactgtgacagatggctcatgcgagaaagtagcaaaggagaagcttcattcgttctattagtgttagaatgtgctatggaatctggattttattatgattgcaaaaggatggtattgaaaactttggagtggaaaatgacattctgaagtattttgagaatatgaatctgcctgtggagtacagaatggacataggtaagaagaggcctggggccacaactttgtcaaaagggcacaaatagagtctgagagaaagagggtttgagacagaatggaaacaatgggaaagatggaatggactctggaggcaatgaactgagaacggatctgacctctgtggcaaggggagaggaggtgagtgatgggctgtaagagaaggtggtaagaagactcatagatgattcagtcacacataaccataattgcacccctgttacctaggtgctaggtgatacaaagagattaatcacatcaacaaaatggttaggtagacagagtaggtatttacaatgaaaaactcaaagtagtctcacattgaagacagagtgaggcaatgagctctcaggagtcaagagaaatattccttgaagtttggagtcacagaagcatcagggaagagatggaacatgagctgaatgttgaatgatgggtagaatttggaaagaatgacaggggcaatcaaagctgtgggatgaggaggttaaagcaaagacacaggactaagaaaacacaaggagtgtttgtgacacattgacgagggccatctggttggaacagagtttgcataaaccaccaaaagaggaaaaggggaaggtagggtgatacgtttattctggtaaaggtttagacaccaagctaaagattttatttttatttctgagatagtctctctctgtcacccaggctggagtgcagtggcgctgtcttggttcactgcaacctccacctcccgagttcaagctattctcctgctttagcctcctgagtagctgggactacaggtgcctgccaccatgggcagctaatttttgtatttttagtagagttggtgtttcatcatgttggccaggctggtattggactcccaaagtgctggaattacaggcgtgagccactgtgccctgccaagcttttataatttaacctgggaaatgtcaagccactgacatttttcagcaaggttgtggccagtgtcaaagagtctttcgggaagtttggtttgtggaagatgtgtagaatatatcaagatgaagaactgggtgacttctagtcaaaaaggaatgatgatataaaccaggtaccaatcagaatgagaggtatggaagaggggcaaaggaattaccagtaaaccaaggggaaatagaaatacagttttacccaaagtttcaaatccaggaggctatgatagcaactgtgctgtatactaaggcatacaactcatgagatgactggtttggtaacagtcctgagcgttttgttttaaagagctgggtcctgaggttccagacaagcaaacatgccaaaaaagtggttcaatgggggggcttgaggctcagctggaaaccatgtttaccataccaagtttaaaaaatccacacagctcagcaattgtttgaagtttttaattaattaattaattcataaagtgaagtattttcaaaagctcatctgagagcttatattctcttgatacagatgaattctcaattgctcttttgttttcattgcaaaacagttcaacttgtatgagactcaaagtggggagggcaggagcagaattttctctgttccgggtatagacattatgggtattgggccatattctcctcttcgttggtaataattcctattttatacatctttctatcaattgcagctcctaccagagtcaacgtcttgattgtaaatactcagtgttggttgatttgcattttcatcatagtcctgaaagataaaagtggacctaagaaaaactaataagcttacagccagttttataatgacagactctatataaacaaatgcaaattggatgtcaaatttgaattacaaaatttatttgagcaaggtccaggaagtaataacagtgtcttcagatcttttctaaaatgataaaaattcattaacaatcttccatggcttggagtctcagagactttcaaaagtcacagcactttgaagagcagagttggcaactaaagttatcagagtgaagaatggcatgctaacctcaggtgcaggatggccaactcaaagtagacctctattctttgttcttctgagataggaactagccagaaacttagttattcaggggtggggtgggaaggctgtgggacccagggtggaaggacccacacagttcaaaataaaacgaaccaactatagtgaaggaaaagagaactatacacagatagtattcctcatccccctgaattgacttatataaaaaagaaaacggagcatccgacaaattgatgcaatcaaaagggagcaataagcctttttctccttttaagcctcttaagaaataaacccatcattttatctagtgttttctctgctcttgcagctgctcgactgatccaaaacatggatgccaccactgagccttgtacagactttttcaaatatgcttgcggaggctggttgaaacgtaatgtcattcccgagaccagctcccgttacggcaactttgacattttaagagatgaactagaagtcgttttgaaaggttagtagagattgtgtctgtgcatcaaagatttctctcttaatatgttcattttttaaatatacaattgttagccattacaaggaatgtcacagaagattaaaaagttaataatccttccaggatttgtgtaccaccaccaagtcactctgatagtggcagacactgaaattaatgtgttgacatctcttagcattcctgctttcatttgtaggtatgcaaataataaagcggtatcatctctagagatggcaggtttggttttttgtttgtttgtttgtttgttttttgagatggagttttgctcttgtcacccaggctggagtgcaatggtgctatctcggctcactgcaacttctgcctcccagatttaagcaattctcctgcctcagcctcccaagtagctgggattgtaggcacctgccattacacccagctaatttttgtatttttagtagggacggggtttcaccatgttggccaagctggtcttgaactgacctcaggtgatccaccagccttggcctcccaaagtgctgggattacaggtgtgagccactatgcccagccaagatggtagttttatgccattttacagaagaaaaaaaattaaatgattggcacagaaacctacttctgtagtctccctacccaaaccctgtgttaaagttactgtaagatgttactaagatttgccttcccagcacaggtatattctaacctggctaagactgtctccctgagaagttaagaaatctagccaagtccctcctatcctttgttctctgttctcccctcttctagaagttattttgtagaagaacaatttttgctactttttaacattgaaacaagtaggacaattcaattcattcatttggagcatgaacggtacagtcacacaaagataattattttccagccatcaaaaagactattcatactaaattccaaattcctctgtgttattgtttttttttaatctcaatttcaagaaaagtaactgttacctatggcagagccgtatgcatcactgttcataaaaaaaaaaaaaagataatctagtcaaaaggactttcatctaaattggctgattaaactgactcccagttctgtgctaggaatgataatctggtaaggggtttggtttttcctataatgttttggaactggggggaggaaatgaatgtacctccagaaaagcaaggtttttttttaactgaacccactttgcaaatgttaattactgcaaatgagcaattatgtttgcatagtgcaaatgagcaattatgttgatgcattttattaaatgtcctatttcagatgtccttcaagaacccaaaactgaagatatagtagcagtgcagaaagcaaaagcattgtacaggtcttgtataaatgaatgtaagtgctcttcatttgatttcattaggagtatatatatatatatattggtgccaaactatgcctagatttctaattgaatttatgtttgttgtttccaaaagctgctattgatagcagaggtggagaacctctactcaaactgttaccagacatatatgggtggccagtagcaacagaaaactgggagcaaaaatatggtaaggcaattttcctactaaaaaagaaatttccatgtaaaatctatgttataatatcattagtgaactaaagcttctaaagatatattttatcttttattgctttaggtgcttcttggacagctgaaaaagctattgcacaactgaattctaaatatgggaaaaaagtccttattaatttgtttgttggcactgatgataagaattctgtgaatcatgtaattcatgtaagtttgtgtgtcaaataactaaagttacctttaaattgtaataaaacttccacatacattgttgttattgatatttagaaataatgctattttcaattgaattgaataagcaaggaggtagtatatccatgctctgtccctaatacctggagttccaattttgaaagtattttcttaatgctgttttcgacattcaccccttgcttctgctacctctgttttagatacctctcccttcacaaaacaaatgataagaagggctccaggcccctcctattcagaaaaagttcctaatttctttgtatagtacttgaaaggagcatgctttcgtttatagaagtaatgcaggtctagaaaccaaaaaataataattgctttcaaaaagaacacagaaaagggattttaaacatcatttttttcctcactaaagagtatctgtacttttttctcaactaaaggtaaataaaatgcctttcttttaaaatggatttattgtatttttacaaatgtaaacaatttgatttaggtgtcacctaagactagattaatgactatgtttggaatgtactgaaaaatataaagagtttttctttcttcctttttttttttgtttttttttttttttggtttcctgtgtaagaaattatacaaaaaattgcaggctactgaatcacctaatcatatctgtgtcactattgcataaatctttatggtcgtttttgttaaaatcatgaaaggaattgaacccaaatctcctgcagtgggctctctctcttctgaaactttctccttgcaggatcaccttgaggaccagggggtggggaaggatcagggcccttcatgtggagatatcttctggctctttccataccagttctttgggttatgttttcttttctattggcctaggctctccacagctgctaggattctctctttaacccagaaatgctctgtttggcctccacactcatgttgccatgcagtgagtaggaaacaatcttgcaaagctgcagtatgcccagatagctcccacttgggtattaaacatggaccagacacgttagcgcaaaactgagtttcctctttcacacccttaactgctatctgggtctactgaggttcttctgagcagagcagctttgaggagaaccaaggagaagtcgcctccattcccttagggtagagaatcttaaaaaacattttctggcacaagttacattagctaaaagattctggagttaccttagaggttttccacttctccccttctccccatccatccaaatcaacttgaagaatattaacccactcccaccaatgaaaggggatcccaactaagggtggaagcagatgagaatgttcccaggggagcacattagaatctcaggaagctgagaaatctgtgaatatgtaatttagaaatttccacgtcctagaatctaacatgtttttgttcacttgcaccttctgctctgcattaaaaatccctcctagtaaatcttttgttcactttcttttgttttccttaaatatctgcagcacagtcctccagattatctaactgcccgttagtataacacttacaagtagtgtagaaagcatttcctaactaggtatttattgagtgtctgatggtcaccccataaacagcaagagtaggatctttcacatacatagatagacatgcttgtatttttcaaacttttctatattcactgaatgatttattttcttttatgtatattttttatagattgaccaacctcgacttggcctcccttctagagattactatgaatgcactggaatctataaagaggtaaaaagaaaaaaaataatcaaaaccaaactacaaaatgatctggtgtaaacctacaagtaatgaaaaagataaagccaaattaaatttagccctctgatgtttttcattcatgacagggacttaaaatcacacataatagtgagctgtctttgatagaatgaacattctcaatagaatgaatgaaggtattttacaaaactaggaaacttgaaattccttatttgtatcttggtttttagtatttaaaacatatgatcgattttgaaaagttaatttaaaatattttaatccacctgtaaactgcattatttaaaaaatgaaaagatttatcatggtctagggtggtgctggtgaggaccagagggtcagtgagagatacactctgcagcatccttctggaaccatctgatttgactgtcagagaactatgcaggtagtgacattgggctcagacaaacttttgcagctaccttgtgactctaacattggccaggtagccagtgggcatcatatcccatagtggacgtttggatgttctggagtgctttcttattgtctcacaaccttgcctcccttgggctgatgttcacgtgctctttttttttttttttttttattatactttaagttttagggtacatgtgcacattgtgcaggttagttacatatgtatacatgtgccatgctggtgcgctgcacccactaactcgtcatctagcattaggtatatctcccaatgctatccctcccccctccccccaccccaccacagtccccagagtgtgatattccccttcctgtgtccatgtgatctcattgttcaattcccacctatgagtgagaatatgcggtgtttggttttttgttcttgcgatagtttactgagaatgatttccaatttcatccatgtccctacaaaggacatgaactcatcattttttatggctgcatagtattccatggtgtatatgtgccacattttcttaatccagtctatcattgttggacatttgggttggttccaagtctttgctattgtgaataatgccgcaataaacatacatgtgcatgtgtctttatagcagcatgatttatagtcatttgggtatatacccagtaatgggatggctgggtcaaatggtatttctagttctagatccctgaggaatcgccacactgacttccacaatggatgaactagtttacagtcccaccaacagtgtaaaagtgttcctatttctccacatcctctccagcacctgttgtttcctgactttttaatgattgccattctaactggtgtgagatggtatctcattgtggttttgatttgcatttctctgatggccagtgatgatgagcattttttcatgtgttttttggctgcataaatgtcttcttttgagaagtgtctgttcatgtccttcgcccactttttgatggggttgtttgtttttttcttgtaaatttgtttaagttcattgtagattctggatattagccctttgtcagatgagtaggttgcgaaaattttctcccattttgtaagttgcctgttcactctgatggtagtttcttttgctgtgcagaagctctttagtttaattagatcccatttgtcaattttggcttttgttgccattgcttttggtgttttggacatgaagtccttgcccatgcctatgtcctgaatggtcatgcctaggttttcttctagggtttttatggttttaggtctaacgtttaaatctttaatccatcttgaattgatttttgtataaggtgtaaagaagggatccagtttcagcttcctacatatggctagccagttttcccagcaccatttattaaatagggaatcctttccccattgcttgtttttctcaggtttgtcaaagatcagatagttgtaggtatgcggcattatttctgagggctctgttctgttccattgatctatatctctgttttggtaccagtaccatgctgttttggttactgtagccttgtagtatagtttgaagtcaggtagtgtgatgcctccagctttgttcttttggcttaggattgacttggcaatgcgggctcttttttggttccatatgaactttaaagtagttttttccaattctgtgaagaaagtcattggtagcttgatggggatggcattgaatctgtaaattaccttgggcagtatggccattttcacgatattgattcttcctacccatgagcatgaaatgttcttccatttgtttgtatcctcttttatttccttgagcagtggtttgtagttctccttgaagaggtccttcacatcccttgtaagttggattcctaggtattttattctctttgaagcaattgtgaatgggagttcactcatgatttggctctctgtttgtctgttattggtgtataagaatgcttgtgatttttgtacattgattttgtatcctgagactttgctgaagttgcttatcagcttaaggagattttgggctgagacaatggggttttctagatatacaatcatgtcttctgcaaacagggacaatttgacttcctcttttcctaattggataccctttatttccttctcttgcctaattgccctggccagaacttccaacactatgttgaataggagtggtgagagaggacatccctgtcttgtgccagttttcaaagggaatgcttccagtttttgcccattcagtatgatattggctgtgggtttgtcatagatagctcttattattttgaaatacgtcccatcaatacctaatttcttgagagtttttagcatgaagggttgttgaattttgtcaaaggccttttctgcatctattgagataatcatgtggtttttgtctttggctctgtttatatgctggattacatttattgatttgcgtatattgaaccagccttgcatcccagggatgaagcccacttgatcatggtggataagctttttgatgtgctgctggattcggtttgccagtattttattgaggatttttgcatcaatgttcatcaaggatattggtctaaaattctcttttttggttgtgtctctgcccagctttggtatcagaatgatgctggcctcataaaatgagttagggaggattccctctttttctattgattggaatagtttcagaaggaatggtaccagttcttccttgtacctctggtagaattcggctgtgaatccatctggtcctggactctttttggttggtaaactattgattattgccacaatttcagctcctgttattggtctattcagagattcaacttcttcctggtttagtcttgggagagtgtatgtgtcgaggaatttatccatttcttctagattttctagtttatttgcgtagaggtgtttatagtattctctgatggtagtttgtatttctgtaggatcggtggtgatatcccctttatcattttttattgtgtctatttgattcttctctctttttttctttattagtcttactagcggtctatcaattttgttgatcctttcaaaaaaccagctcctggattcattaattttttgaagggttttttgtgtctctatttccttcagttctgctctgattttagttatttcttgccttctgctagcttttgaatgtgtttgctcttgcttttctagttcttttaattgtgatgttagggtgtcaattttggatctttcctgctttctcttgtgggcatttagtgctataaatttccctctacacactgctttgaatgcatcccagagattctggtatgttgtgtctttgttctcgttggtttcaaagaacatctttatttctgccttcatttcgttatgtacccagtagtcattcaggagcaggttgttcagtttccatgtagttgagcggctttgagtgagattcttaatcctgagttctagtttgattgcactgtggtctgagagatagttttttataatttctgttcttttacatttgctgaggagagctttacttccaactatgtggtcaattttggaataggtgtggtgtggtgctgaaaaaaatgtatattctgttgatttggggtggagagttctgtagatgtctattaggtccgcttggtgcagagctgagttcaattcctgggtatccttgttgactttctgtctcgttgatgtgtctaatgttgacagtggggtgttaaagtctcccattattaatgcgtgggagtctaagtctctttgtaggtcactcaggacttgctttatgaatctgggtgctcctgtattgggtgcatatatatttaggatagttagctcttcttgttgaattgatccctttaccattatgtaatggccttctttgtctcttttgatctttgttggtttaaagtctgttttatcagagactaggattgcaacccctgcctttttttgttttccatttgcttggtagatcttcctccatccttttattttgagcctatgtgtgtctctgcatgtgagatgggtttcctgaatacagcacactgatgggtcttgactgtttatccaatttgccagtctgtgtcttttaattggagcatttagtccatttacatttaaagttaatattgttatgtgtgaatttgatcctgtcattatgatgttagctggtgattttgctcgttagttgatgcagtttcttcctagtctcgatggtctttacattttggcatgattttgcagcggctggtaccggttgttcctttccatgtttagcacttccttcaggagctcttttagggcaggcctggtggtgacaaaatctctcagcatttgcttgtctgtaaagtattttatttctccttcacttatgaagcttagtttggctggatatgaaattctgggttgaaaattcttttctttaagaatgttgaatactggcccccactctcttctggcttgtagggtttctgccgagagatccgttgttagtctgatgggcttccctttgagggtaacccgacctttctctctagctgcccttaacattttttccttcatttcaactttggtgaatctgacaattatgtgtcttggagttgctcttctcgaggagtatctttgtggcgttctctgtatttcctgaatctgaacgttggcctgccttgctagattggggaagttctcctggataatatcctgcagagtgttttccaacttggttccattctccccatcactttcaggtataccaatcagacgtagatttggtgttttcacatagtcccatatttcttggaggctttgctcatttctttttattcgtttttctctaaacttcccttctcgcttcatttcattcatttcatcttccattgctgataccctttcttccagttgatcgcatcagctcctgaggcttctgcattcttcacgtagttctcaagccttggttttcagctccatcagctcctttaagcacttctctgtattggttattctagttatacattcttctaaatttttttgaaagttttcaacttctttgcctttggtttgaatgtcctcctgtagctcagagtaatttgatcgtctgaagccttcttctctcagctcgtcaaagtcattctccatccagctttgttccgttgctggtgaggaactgcgttcctttggaggaggagagacgctctgcgttttagagtttccagtttttctgttctgttttttccccatctttgtgcttttatctacttttggtctttgatgatgatgatgtacagatgggtttttggtgtggatgtcctttctgtttgttagttttccttctaacagacaggaccctcagctgcaggtctgttggaataccctgccgtgtgaggtgtcagtgtgcccctgctggggggtgcctcccagttaggctgctcgggggtcaggggtcagggacccacttgaggaggcagtctgccggttctcagatctccagctgtgtgctgggagaaccactgctctcttcaaagctgtcagacagggacatttaagtctgcagaggttactgctgtctttttgtttgtctgtgccctgcccccagaggtggagcctatagtggcaggcaggcctccttgagctgtggtggactccacccagttcgagcttccgggctgctttgtttacctaagcaagcctgggcaatggcaggcgcccctcccccagcctcgctgccgccttgcagtttgatctcagactgctgtgctagcaatcagcgagattccgtgggcgtaggaccctccgagccaggtgtgggatatagtctcgtggtgcgccgtttttaagccggtctgaaaagcgcaatattcgggtgggagtgacccgattttccaggtgcgtccgtcacccctttctttgacttggaaagggaactccctgaccccttgcgcttcccaggtgaggcaatgcctcgccctgcttcggctcacgcacggtgcgtgcacccactggcctgcgcccactgtctgggactccctagtgagatgaacccggtacctcagatggaaatgcggaaatcacccatcttctgcgttgctcacgctgggagctgtagactggagctgttcctattcggccaacttggctcctcctccttttttttttttttttttttttttttttgagacagagtcttgctctgtcctgtcacccaggctagagtgcagtggcgcaatcttgggtcactgcaacctccgcctccctggttcaagcaattctcccagcctcggcctcctgagtacctgggattacaggtgcccgccaccgcgcccagctaatttttgtatttttagtagagacggggtttcaccattttggccagtgtggtctcgaactcctgactttgtggtccacctgcctcggccccctaaagtgctgggattacagatgtgagccaccacacctggcccatgtgcttttcttacagaaagtaaggaacagcaggagacaaaactaataatcttacacgttattagatattggggaaaggtgttggttctacaaaggtttgtcttataattattttgtagctcaaaagtaagttatctttgatgatcctaatggctcacagtgtagtgatgtgactaaaattacattttagttaaaattactagctaaatatgtttatgattggcatttattttgccaaattatgaagttcgaataacatggaatgaattcactgtaaggtatctttttgaatgactacacaacactgaaatgaagaaaaagatatatcatcaaaggccacaattaatagcacagataaatacatgggtatgggatatttgagttcagtacaatctagttgctgtgtggggtacagctactggctttaagagcaatgcagctgctttctgttacagatttgaaagtgattgaggaattttggttcactattgtacatttttatcaccatgaactgggatgcttttcatatttaggattgtgttcttatatcaaatttttcaaatcctatgatacatattttttttacattttaattctgatatcaaggtatacctggcagtcgatgtatatatttaaggcagtaaaagctttttttttttcattgttaagatgttgcatttttgcattttatactcaatgctatcccataatctcaaacaggtcacaaactggcagtctttggcttgaatctgatatagaagcatttttgtttaacctgtagtgtttttttttaaattttgaattagttgtcaatatttttcaaaattgaaagatttcatttgagaatccagatttcttagtaagtcagtagaatttgagcccctagcttgcattcttatatggcagcaattgaccagagtggtgttgtggttgctccttttagaaagggcatttattggctgggcgcagtggctcatgcctgtaatctctgcactttgggaggccaaggcgggtggatcacctgaggtcgggagatcgagaccagcctgaccaccatggagaaaccccatctctactaaaaatacaaaattagccgggcgtggttctgcatgcctgtaatcccagctacttgggaacttgggaggctgaggcaggagaatcgcttgaacccaggagataaaggttgcagtgagccaagatcgtgccattggactccagcctgggcaacaagagcgaaactccatctcaaaaaaaaaaaaaaaaaagaaagggcatttgttctccaggtttgaacagttttgaacagtcctcatcaacatgattcatcgatttatattgacttatcggctcctgtaggcacttgattttgcatattagtctggtcttggctaagccacagcagtaaaaacacaaatacagtagctcaaacaagaaaaagtttacttctgtctgtcatgccagtctggaagtaggcaggccatccagatgaggcaggaagctctgctccatgggaatgtctgggagccggctttctttgattttttgctctaacatcaacctcctctggtgtttttcttagtctatttggtcaaagttggttcaccagtgccctattcacatgtcaggccacaggaagaagaaaagagagaaagtggtagacaaatagttaacctttatgtaaatggcgcagaacttgcatacattccgttgcttaaaacattgtcatgtggccacaactaaatataaaggaggcaggaaaatgtagtcttgagcagtggccatgtctgtgtcttgttaaaacttggttggcagagaggaaggtcgtatcatttaaaagatgaggagtacatataccaatgtcatttagcatactctgccacagtttacatccactgatctagggaatactgtatttgtgatcaaataacacagtggtgatcaaatctagaatcagtaatatgtttatagagtttatgagtgagaaatctgagtctcagaagtttgctgtcaacactcagcagaacagtagtatagtggcaaactttggtccttctctcttcttcattctactacattattacaatttcttaagagttggtacttcatactagtagagttctttgaatgagcaaatgatagaagaaactaacctgcactggcacttacagcccggaagttattctcagcttaattaggtgctcttcaacgatctgaatcagactagcaaacacgcagcatgcttgctgccttgctcctcttccataactatgtacttttggtgacatccttctttcctgctaacctgagatctcagaattcttcttaaggtagtgcttcaagctgtaagcaatctcctttcagtggaagggagttgcataaaaataaaagttacatgtcatcccagaaatgggtaattatctgaatatttctgcaccctctccctttttttaaatccattcttttgggcatgggggtgagagcgtgtgtagttacagtaagaattccaatgttacccttatttttcccatgatattttctactctctcctaatccctaccacctgcaatccctcagtttcccctgcatttctggcaaaattctagtttttccactactctgctatctttgaaagatgtcaaccaccttaagtatttctgtcttgtgtcttattgcttcatgaacaaaaaatggtgcgaagtgtagaataacaagtttaccttcagtagaggagttataaatctggaaggaatgttaatgtcagtgtatcattggccttcaatgattttctcccttataggcttttatatatgcttttccctttgcctagaacttgccccccacacacaccacctgcctacactctttcctctaatatagttttcctagcacccaggtttctgtatacttcttatttaatgtctttttttttctataaaactgtaaatgaagtggaagcaatgctgtgtctcattgccctttgctctttttctaatacctaccaaagtttctggcccttaaatactacagaatcagcaaatgaatgattgagggggaagatagcagggaagagaggaaacaaaagaaagaagaacccaatcttttggaagccctccttgtttccttcccttgattccgggaaacatgagctctagggcatcaatagctaatagcatacatttctttagcattttacaaactctgtgttctcttttctcttttcaatccccagttacttctttgctaaactcagtttgcctgaggtatatttatacaatcaatgggtatcatacatttgcagtttacattattttattggaaataatcaagagaagttttgagaattggcatagggtcaccaactttttttgtcaaagaaagatggtcttagaccagagaggtctggcttccttgcccgtcgctttagcctataattttaaaactttagtgtggggtctaccttctgcagatatgcctcagaggctgaggatcacagagggtcacattccctcttcagtcaaaagtactctaatcgtaggtctcctttatcagattattaactcagcctgtttccccaggtcttctttgatccttccttccaggatatccaggtcatccagaggtatcatctcccataatcttaaaaccaaacttcttatcgactatgaaaatagcccccacaattactaagaagatcatttcactttatagaagtcattttttttttgctttggataccctcataatggaatttttgtattgtaatatttgattattattataatctagaaagggaaagtgatagagaacagttgcatcatctcagaaaggggcccacattcaccgtgtctgctcttcctaacaaactgttctcaagatgttctcatcaaggagcttcttgtgctatatctttgttaaagagatggagcctgagttctgaggtattctgattatctgaagagattacttaatgacacaatgctatctcaaagaacagaagtagggagattcaagacaattctattccttacagaggtacaaatttctatgctaggaaaacaatacgaaagatacacatggcccataaacataaccattcccattcacaaaatttgtaagtgaaaccaaccagcaacctcatgtgagaatgttcttctatattgattcactgagagaaatgaggaccttaattttcttaagaaatcacccaccttcagaagagtctgaactctgtattgggggtgaattggaattggtctcaaagcttccctttctctaccttcttagcttttcaagagcaattgttatcttactttgttgtccttcataaggaaatctgaagattaggaatccaaaatatttgagcataattacataatagatatgtttatgctctgtactgatgtttgcctgagaaggagcaataagtgaggttagtggtttccaactctaaggactactttgtgtgtgccaattacagggctctgtgcagaaacacctcacatgtacacacacttcaaaagccactatgatttatttttacttgtgcatttatacatccacaaaacatttctttgagtagagcatttcaggtctaaaagaaaagtaagaaaaccactcaggctagagtttgagagcataaggaggcgggaaaggaactggagagtagaagctacagggtatactgctgcagggcatggctagggagaagaagccagagttataaagaagtgtagagccttcacaaaatctgaggttcataaaaatagagacattttagggatgaggatagaggacttggaacatgggcacaatggactgaagccagaaagcgatgacccagagtctgtgctcctagatcagaaaagccaggagaagtctccaaattatatgtacctgggaaagaacacaagctgagattggctatcctgtagatgagcaggtgcaagctggaactgggattaaacaagaggggattttctttgtccacctacccaatgtacaagctgagagaaactgttcaggacttgagctaagaatagaagttccgaggaaataggaagtgagagaaacttaatatatttacaatttaacttcatttttttttaattcaacagatcttcattgagcttatgctatgtgacagatacttttctaggcagtagacattccaaggaaacaaggtccttgttctcatggaactcatgttctaatgggaagagatagacaataaataaccaagtaaataatttaaggaaatgagacaaattgtgagtgttataaagaaaataaatcaaggtgatagaataataagtgactggggtaaggcatgggtgattcaatttggcttgctgaaaccatctctggctgttgtttgtagaatgtgttttaatggaagcagaaagatcagagaaggccacatggtaattcatgtgaaagataacgatggactcagatggcagcaagtcagatagagaaatctgagcagacctaagataatcttgtgtaggtggctctatcattatagggaaacagtttgtgtactttaaactgctcggccaatatgtgcctcagtgatacgtggcggagcttgtctcactgcataacacagctatgacatgataagacaggccctgcaagggaaactgctgacctcactttgtcctttctgggtaccaagtgactaatagtcagaaggtttcactcagttcagtaatctgtgtttaagaaaacaaaagggggcttttaaacatgagatttagtgaatatgacagagaatttttgagatcaactgaactcagtttgtaaaaagagctagattcagccccccaagcatggaataaaccttggaagttatgcaagaagttgtacaaatcttcaggttcttattgataacctgatgaaagccccaaacagtccctatgctggtccaagtttgggtcctcttaggtcccacgttcctcctgctctagcgtcctgctccactgggggctattttttatttccagtgcccagaaatggctgtgtgactatatgtttgcagtctgttggagggaagcaggtctctctgctaacaactgcacactagctgacatgctgcttaaattgagaaatgtttctaagcttttttggtaggaaataatctttcctgcttagtctccctctgtgttcccccagcaaacttcttgtgtagcattattaaatattccccaacatcagtggccaagaatgacacaattctgtgactcctcagtcacttcatgctccacattaagtggagtttcttcctagaatggggaaggcagaacattggtaagagctaggtgtctcagaatctttggaaataaaatccctgatccataggtagttggctcgctaggttacccagatatcaatctgacaggacagttttctgttcctccctgggtcttgattgtcattcattaggaatgaaattaaagtttgaaggacagtagtcaaatggcattcatttgctctcttcctctttggcaaatctaacaaacatcaggctttttccaggcaggaagagcctcatttctaaagagccaatttataaatatcattacctgattctgcaaaatgaagatagtcctaactagagtaactatccatggtgttgggtgttagtaaatatcatctcattggtagtgtgtgattttaaaacccacaaaactgctattatatggattttatctaactgtttaaaaccgatgatcacctttgaaactactgttacgagtactaggacttacaattttttttttaagaaaagctacataaatgttttggtggattcttcttcacgtaaacaatcattgatttgctatctcagagcttcaagaaatctaccttatgactgtcaaaaatgagagctgactctggcctctgttgtaataactaattgctctctcagtcacacacacacaaaattaaatttgggtttaaaaagtatcctggccaatctactttttaagtgttaaaatacatgttgatttgcctgacgtggtggctcatgcttgtattcccagcactttgggactcagaggtggtggatcacctggggtcaggagttcaagaccagcctgaccaacgtagtgaaaccccgtctctactaaatacaaaaaattagccgggcatggtggcacatgcctataatcccagctaaggcaggagaatcacttgaacccaggacgcggaggttgcagtgagccgagattgcaccattgcactccaccctgggcaacaagagcaaaccccgtctaaaaaaaaaaaaaaaaaaaaaaaatatatatatatatatatgtataaagtttcttcccaaatcatgacaattatcatcatttcacattttccatatctggaagtatcataataaagaaaattaaaaccttaaggtagaatcacatctcgtacaatggatttagcacggcagtaaccttaagttctgacaccagataaatttggaagtcaggaaagatagtcatgatactaagacatatgttttaatcagttacattggagtagttaccaggtaatggaattcattaaaagaagtggtatattccatgtagctatattaaatactcgagcatcccagaagctagtgatactatatgcttccagttttctgagaaacttgaccagtttagcagactagaagcatcatccaaagttcttgtgcttgccttatatcaaagttctatagtctttaaatacatcggtaaggataaagagactggagcagaatcagtttgctgagtcaacaaagtgcccaagatgattactgttattgttttctcacctcatcaacaaaaagcatcccatatatatatatgtatatacaccatatatatgtatatatacacaccatatatatacacacaccatatatatatatatatatatatataccatacatatatagtgtgtgtatatatatggtgtgtatatatacatatatatggtgtatatatatatgtgtatatatatggtgtgtatatatatatggtatatatatattttccaatatcaattttccaatatcaatctactgagatatatctcagtagattgatattggaaaattcgaactaccattttgtttatagtcagtagtaataccctgctaaaggtcgattgatttatatgctttgggaatacagttaattcaaaacactgcatgcttgtactttggaatagttggtcccatgaggtatgaactcagacatactcgtttacttcaaagtgaaacaaaaattctgattaccttaaatagaaaaaaattgagttgctgagaatatacgtaaaattgtcttttcatttctgttactttagtgattagagttttttaaaaatataatttcaagttttattttagattcagggggtacatgtgtagttttgttacatggatatattgcatggtactgaggtttagaatatgaatgaccccatcactgaggtagtgagcatagtacccaatagttagtgtttcaacccttgctccactctctccctccaccctctattaatcctcagcatctattattgccatctctatgtccttaaatgcccaacatttagctcctacttataaatgagaacatgtggtatttggttttctcttcctgcattaattcacttaggataatgacctccagctgcatccatgttgctgcaaaggacatgatttcattcttttttatggctgcatagtattccagggtgtatatgtaccacattttctttatccagtctaccattgatgattctctaggttgattctacgtttttgctattgtgagtagtgctgtgattaacaaatgagtgcataagtctttggtagaatgacttattttcttttgggtatatatccaataatgagatttctgggtcaaatggtagttctattttaagttctttgagaaatctccaaactgctttctgtagaggctaaactagtttgcattttcaccacagtgtataagtgttcccttttctctgtagcctcaccagcatctgttcatttttgacttttgataatagccattccaactggtgtgagatggtatttcatcgtggtttagatttatatatctctgatgattagctatgtttaatgttgtctcgtacatttgttgaccacttgtatgttttcttttgagaagtgtctgttcctgtcttttcctactttttaatggggctatttgttttttgcttgttgaattgtttaagtttcttgtagattctggatattagacttttcttggatgcctagtttgggaatgttttctcccattctgtaggttgtctgtttactatgttcatagtttcttttgctgtggcagaagctatttaatttaattaggtcccacttgtcaatatttgtttttgttgcaattccttttgaggacttagtgataaactctttcccaaggctggcatccagaaaggtatttcctattttgttctaggacacttagagtttgaagtcttacatttaaatctttaatccatcttgaggtaatttttgtgtatgatgaaagttaggggtcccattttattcttctgcatatgactagccagttaccctagcaccatttttgaatagggagtcctttccctgttgcttatttttgtcaactttgtcacagatcagatggctgtaggtgtgctgctttacttctgtgttctctatcctgttccattggtctgtgtgtctatttgtgtacccagaccatgctgttttgactactgcagcattatagtataatttgaagtcaggtaatgtgatgcctccagtcttgttcttgttgcttaggattactttggccatttgggctcttttttggttttatatgaattttagaattgttttttctaattctgtgaaaaatgacattggtagtttgataaaaagagtgttgaatctgtatattactttgggcagtatggccatttgatgatactgattcttccagtccataagcatgaaatatttttgtttgtttgcttcctctatgatttctttcagcaatgttttgtagttctccttgtagaaatatttcatctccttagtcagatatactcttagatatttatgtaatgtgtatgtgtgtgtgcctattgcaaatgagattgtgttcttgatttggctctcagcttgaacattattggtaaatagatatgccaccaatttttattcatggattttgtatcctgaaatttttgtgaagttgtttatgagttccaggagccctttggcagagtcttcaggattttctaggtatagaatcatatcattagtgaaaagagagagtttgacttcttttcctatttggatgccttctctttcgttcttttgcctgattgattgatctaggtaggacttccagtactgtgctgaataggagtggggagaatggacgtctttgtcgtgtttctgttctcaaggggaatgcttccacattttgcctatccagtatgatgttggctgtgggtttgttatggatagttcttattattttgaggtatgtttctgcaatgcctagtttactaagggtttttattatgaaaggacattgggttttattgagacttttcccacatctattgagatagcccaatggtatttgtttttaattctgttgatgtggtgaaattgattaggatcttaatgcagattcacagatgaaaaattgttctattgagtagcaaatccatggatagcaatcacagctagatagtcacagcattacagagtatccatgaaaagaactgtttacttagcatttagtaaaagtcatagaataccagtatataaacctctggacttacaaattgataataattttgtacatttttcttaagttcttgcttgatcgaatatttctattttcctattagttttaggtttgattaatggatcactgtaaattcagatgcacctttgcactcacagtgaatatatggatgttccttccacttctaattgttccataaggatgtaaaatattcttaaaactgtgaaaatgttaaagcacattatagcacactttatagcctttctttgtatttaccctgcaaacaagtctttgaagcatagaaatctcacctatccataatcacaattgactgctttactaaattttaaaatgaggtggaatcgtaatgtattttaattgctaataggtaataatggctaataaatagcaattggttcaaacctaacaaaagtgggactccatttcctagtgttcttgccactgtgaacttgaatgaggcatttatatattctgtaaaaggttagtaatacaactattctatagtttacttttgcaaattaagatgtatgtgaagataaaatataaataatttgagttatcagaagaaaactaatatctaaatctatggtatcgtatagtgaaattttacagtaacaggagctatttatggaattaactaaaacctacaggtgtgtgttggtggagctcctgacaacacagcttcataaaaaagaaactgcttgactcaaggagacagataaaaagaagtgtgattatattatatgagtttgtggtcatttttccatgaatagttgagaaaatgactatgaaaaagagatttggtaaagaaatgtattattatggctgagcatggtggctcacgcctgtaatcccagcactttgggaggccaaggcaggcggatcacaatgtcaggagtttcagaccagcctggccaacatagtgaaatcctgtctctactgaaaatacaaaaaattagctgggtgtggtggtgggcgcctgtactcccagctacttgggaggctgaggcatgagaattgcttgaaccatagagatgtaggttgcagtgagctaagacagcaccactgcactccagcccaggcgacagtgtgagactctgtctcaatgaaaagtaaaataaaataaaaaaagaaatgtattattattcagcgaaaaaattagtatatgttattgcttatcaagtgttttgcaactcattctaatcaaggcaaaataactttattgaaaattgaaaattacagtctccataaccaagtggttatacattacttagtactttcaaagtgatacctcattgctctcctttaagctcttattcaaagatatattgactgtctaagaatctgtgcaggtcatttctttaaatacttagaaaaggatttttattttactaaggttatctattaccaaaaattaatattgaaatgaaaataaattttaagtaccatgatgaatatttagagctactccaacagtttagtgctatttttttcttgcaggcttgtacagcatatgtggattttatgatttctgtggccagattgattcgtcaggaagaaagattgcccatcgatgaaaaccagcttgctttggaaatgaataaagttatggaattggaaaaagaaattgccaatgtaaaacacatttttttttctgatacactgaataatgtcaaccgctttttttctttcccctctctatcatactttaagagtaaaaggtacagcactttaaccaagtagtaaaaatgcatggcttggtaatagatcattgacttcaaaaggacctttgaaactaaagaattttatagtaaactgggttcctgacatttaaaagacacactaaattggacaaatattaaactagaaacacttaattgccttttataagtggattccatcagaattctaccatttacagtcaaactgttgttagatgcccttcagactcagagcaaatgcaaagctgttttagttttgatatgtatagaatattactttattttaaagtttaaagtgatcacagagattgtctctatttctttgctaagaagtattaacccctgaacatagccatgtggcaatgtgatactactgagttcaaattgtcaggctgctgagctgacggagggtaagacaataattttgcaacaaagcccaaggagtgtattcctgaatttcttctggctctagatcaacccttggagtctgagttggcactttcttccctgatgattctttgatagggcactgcagtctcaagtgagtgaactctgagtctaagcagcatccaggttactgattaaacccatcgtcagagtcagtctaggacccacagagttctctttgtcattgcaaacgacaacctgcatccctgactccctatctgcttgcccctgccatctaagctcatcagaatcttgaagagttaagatcatggagggcaattttagctttcctggggctacgtgaaaccaaaaatctcctatcagaaccagggtgttcttggagctgccactgaatgaatggcatttgaatgggttacatgtggttctgtgttggaaacagacttgctagaggagaaatgtttcctgctctgggtttttgccacttgcaccttcccagaccatgcgctcctttgaccagcatcagctctgtagtgttgtgtcttacctcagcattatgtgtctatattctcactcttgtattagattcttgtattagattggcatgaggccttagacgtctttgaatcatttatgcatctctaacaaaatccagcatagtattgcacaaaggacatgctcaataaataattgttttcagtaaatgaataggtaagtgacctaaaggggaaactggagccattgtcactgagaaataattccaattttaaacctttaccttttgtctcttctcacttaaaattgcttttactcatttcagccactagttggggagttgttattgcaatttttctttttaattcagtgaaagaaataaaattggatgctgctggtctggcaggataggagaacagtcacaaaggtccatgatgttgccattctcagataacttgcaaccaaattgtgctctgtactaggaagtttctctgttacttgcgataaattcttatagaaactcttgcacctttttttccttgctgaattttaactaggacaccgaatggtaatggtgaagatgggagagagagtatttaagagagaaattggagatgactatatcaaagaaagttaaaatatgaaacattcacagacacaactgaactggccattagccatagctcataaatattgcttatatggcttggcagttgtcaaaatatagacagattttttaaaaattttaaacttgaccccacagccaaatctcaataattcttactacttctactccaaaaatctcttacatttcactttttttgaaatgacaaaacaaattacaaaaacaagtacagaataggacttaaattatgttgtacctatcctatatttttaccctcatatgtagttatatttttctaaagaattcttaattctaaaataatgattaaaaattaaatccataggctacggctaaacctgaagatcgaaatgatccaatgcttctgtataacaagatgacattggcccagatccaaaataacttttcactagagatcaatgggaaggtaagtggtaagttttttgtgctctcttattgtgccgttttctaaattataacattgaaatactctttctaaaattcgtcaagtttttatttattgaagtaaatgggacttcaattccttttttttttttttttttttttttgagacagggtctcactctgttgcccaggctggagtacagtgacacaatcttggctcactgtaacgtccacctcccaggctcaagcgattctcctgcctcagcctcccaagtagctgggactacaggcatgcaccaccacacctggctaattcttgtatttttagtagagatgaggtttggccaatctggtctcgaacccctgagctcgagtgatctgccggccacagcctcccaaagtgttagccacaggtgtgagccaccactcttagctggtaaaattccttttaaggcagctatacaataatactagaaactcccataggaaggggtttgaaaaatactaaaactgaaaatctttctgagaggccattatgtagtcatcagacttggacagtcacacaataaaagcactagatttccttttaactccaaaaaaggataatttattcatagaacttcccgtgttctcatcaaggccatctacagaggtgttcagaacaataattcagaaataggacacaaataaaaagaaaagctctctcatagattccatttataaacagcagttgacttctttttccttacctagtatccaataatctctttttgtggctatgcatttattctcgtgtattagttgatgcacacagccaagagatgaagcaatatccatgggaaaacctacaaactaccacattcagcgatgacattctctttggcactaattctagttaacaaggacttttccaaaggcataaactattgagttagacatcttacatagaattttttaatataataagtgtttaataaatacgttttgaaagaatgacctaaaccaccaaaggaaatgaagaaaattgtatagcatagcaccctatactcagtaagtgatgtgtgcttgtgtctgtgtgtgtaaaatacaacctaagatattgatagtcttaaacattatcaattcccatttagaaagacaagatttcatcttttggcaactccgtacttagcttctgaagtataaacatggcatgcctgtagacccaatatcgataattgaaaagatgctgttttctttgacttcataacatcactgtaccactgctataacagtatattttcatctataataggatttccactgagatgtgttactgtgtttgaatgaattgtttattaatacccacttttaaaagctaaacactttacacacatttccatttttgcataaaccaaaaaagctttatttttaaatttaaatttaaattatatttttattttctgtattggttagacaaagaagatgacattaagcctaatttctaggtatatgttccttaagcttaaaggctttgttttcgctcttaaatggttggcttaattatgctaggtaaataatcatgttgcagaactagtttttatttaaaaactgattgaaacaattgaggaagaatcccaagtgaatatcaaactgatccaaccctctaactataactgaatcttggacccaagaagagaaatccacaatttctgaatgtttcatgcctgcttttttccagccattcagctggttgaatttcacaaatgaaatcatgtcaactgtgaatattagtattacaaatgaggaagatgtggttgtttatgctccagaatatttaaccaaacttaagcccattcttaccaaatattctgccaggtaggtatgtcacagtccccatgtcctcaaagtttgcatttcatatcactcttcagaagctttgcagcctcatcttttctgttgctgggcggtggttttttttatacagagatcttcaaaatttaatgtcctggagattcataatggatcttgtaagcagcctcagccgaacctacaaggagtccagaaatgctttccgcaaggtgaagaaaaaatctctcttttcttaagacttaaagcataaagtgatacatggttatgaaggcttaccatgtacactgctaggacatggtgaactttgcaaagggacaaaatgccaaagttcgttatcttgcacatatttaggacatgttgctgaggaagataaatcttcatgggctttaccatcttatgatggtctatgtggcacgatgattgcattgtcctgtaaggagttacatttggttatttaaccagttcatgaaagaatactgtctggattttttgttgttgttactgtgttaaaagtaatttcggggttatctattttaattaatttgattttcaggtgctcattgcacactggacatatacacagatggacaatattgatgtgggcagtctattgaaagtacccctacctggagttaaataagaccttttcttagcctatacctatattatttaaacaatcactgttttggtactatggtgaggggagtaggcagtagggattgaggaaggagagactccagcaaacatgttagttggagtcttggaaagaaaataacgtggactgattaaaatttctagtttttatccttaaaaagaaaatgtagacatctttttaaaattaaagaatgcaaaaatgtattgtgctaaatctcccttacttaggttatcctgttattcttaaatttatacacatacaggttctgtaagtactcagagttcagctaaaaccttgaaaagcagtaatgtgttttctcatataccatatttcccccattacatttattgaatatgacttcacatttatgtttgtgcagtggttacagtgttgtatgtttttctaacgctttctacaatgatattaagttgtaatagcaaaaagttctactggggcatctactgaaaatatgcctagttttcagatcatatataagtaaacaatccatttggattacatttcatcataggctaggaacatgggccttgtgaggagaagtgatgaatatttcaagaacttagatgagacatttgtgaaatgtgtgctcttaacatgctccagacctttccttctggtcaaatgccatttcctttttcttttccgtaggccctttatggtacaacctcagaaacagcaacttggagacgttgtgcaaactatgtcaatgggaatatggaaaatgctgtggggaggctttatgtggaagcagcatttgctggagagagtaaacatgtggtaatgttttcagaataatacactgtcagttatacaggacactatcagtttgttcacactgatgagcaattacagttctccatcatttggctaaaattttattaatttaggcagagaacctctgaatcataatatgccattgtttcccaataaatcttcccttgccttccccaagagtctagttatgtttctgctcctaatactgtctagtctgaaaccaactcaccattttccagaagcagtgtatttggagtacccagtaacatgttctattgatatagtcatttataaactcttctattatcaaaattgcccccaaattagtattttcttaaaaacatagaaagtaaaacaggatttatttggagtataagaaatgtgctttatttttcattgttaggaaaatgaagacagtggaacttaatggtatggtgaaagaatttattgaaatgctactttatgcttagctaaaccactaatggtaatgacagccctaatattttacattagttcttccagtatgatagtgaaaccattatattctgaaaatgatttttaccttaatgcatatattaagacctatttaatcaagagtgtcgataatagcaatattgcttttaaaatataatggtcccatatatctgttagcttaggtcacagtttgtctataaatttacgtttattaacatattaagtcatacaaagatagcatgtagctctatttttaaaaatctgtgttacaaagaatgaattaatgacctatatttgtcttctgttctgatttgaggtcgaggatttgattgcacagatccgagaagtttttattcagactttagatgacctcacttggatggatgccgagacaaaaaagagagctgaagaaaaggtaaagagcagacagctaactagcaaagaaaaatctttgctagtataggaaaaattaactttaaaaacatttagaaaaaaatataatcaaagattgcataaaaacttgtaagctccttcaatatgtagtgtttccagaaagagtttttgtggataaagatatatttctacaattttaatcttttatctctgcaaccaatactctagcaaggtgaaaatattaagtttctgttcaagcaaatgtaaggtggtgcactattggtgcattataagatctataattaaagagatgttgaagaagcttttttataactattcatgcccacccataatgtgcagcttttattgagacttttactgagtttcataagaataggtctaagatttctcaggaaatcttaggtttaaatttactgtgatcatttgtctttataattatataataactagggggaacatgtcctgtgaaaactgttaacatgctttatgagcaacattcacatgcatcctgactaatctctgtagttaggttggcagaaaaagcagacgatttggattgatagaggagacaataataaatgtattttaataagataatcaaccttggtctagttttcttttagaattaaatcacatggaaggactatcttttttcagctctcaaagagccctgagtgggttaggcctagaacctctgcccccagtattgctatctttccatcactctggccagctcttcagacattcaggttggatttgctcctttcatgtcacagctgtgcatgacatggctctgcttggtaaagccagttggattgttctggatcggcatttccaaagtggtgtcacaaaatactggacatgcaagttattccacaagaggctcatggtcaaaagagtttggtgaacacttcttgtaggaaggcttccctcatctcaccctaggctgggttacatgctcctagggtgtgattttattatcatacgtgggagttaatatttatttcactgcttatcattgctgtttacaataagctctttatggttgggggcaggggggcagaaaatactgcctagcattatatcctcagccctttataacatacctggcccttggtagacccttgaaatatattgagtgagtaaattgataaattaatttcccatcctggatatttataataacttatgattctaaccttataatctaacccatttttaattgtaagaagtcctgcaataaagaaacttgcttaatgtttttgcgacagcatttacccgaagtaattcacaataatttttttgtgtgtttactaccttatactttctgtagaatttgtatcctttagaacactctttaaggaaatgtcttacagtaaataaagtatcattaagtgggggctggattgtcatgactgatggcaaacctacaagaaaatgggtttggcctcagtgacttcagtgatacatatgaggcctgatccactgactggggaaatcctgggctcatgtgacagatttgtaataaaactgcatccatttgatgggaaaccatgtaactcagagatacaggctaaaccccccatgaaaaatttaaattaattaaattatttaagagtgatacgaagtggtaaaatcaaaagtcaagtatcattgagaaaatcaagagagaaataaaataaaaatagaaataacaagtagtaaacaagtgataatgaaataataaaataagtaaaataaaccattttaaaataattaaaaatgaactttagaagtagtgataaataggccaggtgcagtggctccctggtgtaatcccagcactttgggaggccgaggcaggcagattgcttgagcccaggagtttgagactagcctgggcaacgtggtgaaatgctgtctctacaaaaaatacaaaaattatctgggcatggtggtgcatgcctgtagtcccagctatttgggaggctgaaatgggaagatcacttgagcccaggaggtggagattgcagtgagccctgattgtgccactgcacttcagcctgggcaacagagcaagaccttgtctcaaaagaaaaaaaaaaaagatagtagtaaatacataataaatatgagctggaataacaaggaaaacctcgttttccacttaactaattaatgtcatttattgaacttgagaagataggtacactgactttggagaataaaggagaacataaaaactccaggaaccaatatttaggactagtattagcagtaaacctataagcccatatctgttttctcagtcaaatcaatgaggcagaaaggtaattataacctgctggaatggaagctgtaaatattacttcttctaaaaaattgaaaaaaaaagctttgagagaaaaagttcataaaagtacaaaatatgtggaacaatgagttttgtcagtttttatgttggttttcttgagaaagctgcagcctataaggataaggcattagaaactcaatttcagacctgattttcatttattcttgaacctcccaggaaagagccattgcaaagatctctgtttaagtatgtcagacactcattttatgaacagtatggatcaagttattcaattgctagtcatgggcagattataaatttgtatctgaaagttatataatcatcttcacattcaatattataattttcataggccttagcaattaaagaaaggatcggctatcctgatgacattgtttcaaatgataacaaactgaataatgagtacctcgaggtaagtctctataaaatagactctggactactgatacttagggctggtagtagtgtcatttttagctatggggtgcctgaaattatatgaagtagcctgaaaccacaggttgtattatataaagccttcaacgctggtgccagaatgatatttgttttagcctttttgttttcattagccaggactatatttggttattgttcatttggtttccatatattccattttaagaaccgtaagtaaaatctggtgtcctttaaagagtatcaaggaagggatagacatcaaggtggtgaacaacaggcaggcttcttatcacattttacacaggcttcgagtttccctccaccttctaagttttcctctactggaaaaaccaattcatgcctactgtattttaaaaacaaaacaaaacaaaccctgatatttgagaactgaaaactattttgttctgccctggtaatgtaacagttaaaagagcagagagttgcttaaagtcactgcagtgctgatttcagactcaactgaaagtcttgctgctaactctgcagtcaccacaactacatgataccctgatgacagcgaggtgatccttgcccaggtcctgggatgacagtgattcctcattcattgattactagtctagcatggggatttgcaaaccatactgccttcttctctctttccatttgcagaagaaacttgactttttcttttaaatgagctggttatagcttgcaagacccaggggtccttatagcaggagcatagtggctacgaacacagactcaaaaccaagttccttgattccagatcccagttccaccactcatttaaacttggtcgagtgactaaactatatctcagtttccttgactttaaaatggggataggagcccttagttcatcggtattaaatgaacataatattagattctattagtataatagaattaaatgagtataatgtaaaatttaaagtacttagaatagtacttggcacatggtaagtactaaagaagaatgtgctattatccacatgtgttatgtgaagattaatgtcattaatgtgaggtttgtttgacacttggtttcatttgattattataaaataatacactgaatttgtgatttggctggaatactgacctgtgatatactaatagaattaggttaactggaactacatccttttttggtaagttttttaatgctctcttttaactttattgactgatataatttaagaaaatccctatgtttttagcaaaaatttagaagataccggttttaatatttcttcccaaatcttctttataatacagttgaactacaaagaagatgaatacttcgagaacataattcaaaatttgaaattcagccaaagtaaacaactgaagaagctccgagaaaaggtggacaaagatgagtgcgtatattctcatttctaatgtgatcatctagaagcaggtctttccctcctttctttgttggattaagtgaaagagcctcagttagaaaaatattaaaaagtacaaagtcctctttttattgagaacttctaaaagcatctaattatggtatactaaagatatggatcaagactttaaccagattaaaatacctttctcattaaggtatcctcaaatttacatgtctttagtttcgtcttatgtcattgcctatcagctcaatttatttgtgaacaagattctcaaaaaccttagcttaagtaagccaattcatagctcctttaagccttctcttaggccttactctgtgtccagaattttcttctgctgacagccccaccttttttctatcagtcaatcccacaactccatccccttcatagatagttaatgtaagacttttctaaccctgtggtagtcaaataggagatactaggaaccattcttattcacagtcttcttatgctcttaatctctgcttattagtgacattagtatttcctaataactattagtttagattttattttttctattaaatagatataactaacatatttatcagcatatgtgtttatgcaccgaaattcctagaaccacttatgttgactttttctccctaggctcttagcccctagacaacaggggctattccttttgaccataaagtctcagcatctagcatactgaagaatctcagttaaaacaaaattaatgagtgagtgagcaagtgaaaaataaatatactaacttgatttgtgtggtaactaacacagtaacatgccaaagaggtgcttgtttcattcatgcattcatttatcctttcatgcatttattaacattttggaacacgaagtccaggtgtcattgggtactgggagaatcaaaggtgaactttgattacattacaagagcagaaggtagacaagacatggtgtaataaactgcaccaccaagagggaaatgtcgtgccaagcaaagtacaaagtgctgtgggcttatttgatgataagactgttctgttctcagtaaaccaagtacaggttggacaaaactgctaatggaaatgccagtgcattttaatccttactcaacatgttgaactcttgcaacactgacgtgtcctgaaagagagagcaactcttttgctgacttctaagttcatattggaacaaatattgtgttatctgatgctaaaaatgggattgcaaatattatagaatgtttagtgtcccatctgggaaagaaagagagtgaatacacatgcttggcattataatcaagttaccatatcctgtctcttgaaacacacaaaaagttatgcaaaataattatctgggtgaatttatgatctgagaaatttcttataagtctgtatatttgtatttctttaaaaatagacatactaagatttaataattgttagcactataaaatatctatagacaaatactgtcaaatattatttctgaaatggccaaattaaccagtacccataggacatcaggaaatttcttcataattctagaaatagttgttgaattattgcttgatgttttcttttgaggttaacgtagtgccagtttcataatcattttgtcatataatttacactgttcattccctttcatcatatgggctgattttctctgcattcttctctttttaagatagataatcaaaagccaaaagtgtatacaatattttaatgaatgaatggtcaatagcacacatgcttcagtagtactttttggtcctccccatgagcttctgatgatcacaaatgcaatatgaattctaaggtcttctctgctatatggagccagctttcctttctttcctatagtctgcctgtataccagatacaaaggttcaaaactctagctgcacatgataatcacctggggaacattttaaaaaacactgattccccagctcaagcaccctagaatgtgatgtaattgttctgtagctggaacccagatactggtattctttttaagtaccacccaccaagtgagaacccctgagttagtgttatttcccttttgtgtgatatcattcctgttcatattcaattttatggaatttttcacaagatgatgcctttaatttggcaatttaggtttaaaatttatttttatcttccaaaataatcagaaaccctctgacagtaattgcatcaaatcattaagactgagccctataggatacaacatgatcgaagctcctctcattttattaaggtttcttgcagggaaagttactgacttattttgaacctgcttaatagtaataaagttggctggacatggtggctcaggcctgtaatcgcgccactgcagtccagcctgggcgacagagcaagaatccgtctaaaaaaaaaaatgtaataaagtcattactcttttttcttttctctttttgtggagcaccaagttcaagtccttgctgtgtatgtttagacagataatttctgttgcttctacttgtccacatagcccgtagttacatcttagagaattacattttcagatgctcaagatcctcactcccaaagtcttgaaagagaaatatgtgtgcatacccaaaactgaagggacagagttgagacttttgtagggttgtattgtagggcacttcagagaaatgatgatgcattaaattttcaagacagcaactaatgtaaatgaattcaattagccaaatagtaaacttctagacacttttttcccccaattcacatgctctcactgggcaaactcattttacttctcgacatcttctatcatcatcatgtcagctgaatatttgtatttgactcagatccatttactaagattcaaatccaaatgtctacatgcttatgaaacatctccatgtagatgtcttattgaccctaaaaacacagcatttgtcatttaggcaaaaaataatatctgcccattttctaaaaacctccattttactgctaccaagacagaaaccaaggactcattttaatcatcctagacttatccctttctgttattcctgacatctacagtgatagttaattcaaatctccattttaaaaaaaaagtctgcatccaccagctgctatttaaatattacgtaggaatgggaagaggggatctctagctcaccattcccatggtcacttctgtaattcagacatttctcactgttcattgactcatctcaattattatcctactttttttaccaaccaccttctatatcttcagtttatcctccacactactaccttagagatttttttgaagacacaaattggcattttatttcctgatgaaaacacttcagtgtatccctgttgcctgtctcatgatgtgtgactgttttgaagagaaccaaggctcttcataccccacactagcactccagagttccttcacattcaccctacacctcaccattgtccaaagctccaaccatatgaattacttccaaatcctttctctgtctttcttacatccttgtctcttaccctggaccaccctttatgccctggttcatctaacagaaacctacacatgatttgattaaactttaagtgtcacctccttcctcacagcaccccattgcatatttctcttcaccttgggctgttctacactttgcacattttggtcaaagtaccagtacattttactacgtttagttggactagcccctattgaaagcaaaaaccagatatttgtgtcaccagagcttaaacactaatgaacagaatgtagctctttatgaatgtttatgggaagaataaatgataaaattgccaatttgtaataatgataataaaactaactcagctgctaaaataaaaatggtcacatctggctgggcccagtggctcacgcctataatcctagcactttgggaggtcaaggtgggcggatcacttgaggtcaggagtttgagaccagcctgggcaacatggtgaaacctcgtctctactgaaaatacaaaaattagccaggcatggtgccatgcagctgtaatgccagctactcaggaggctgaggcaagaaaatcacttgaacccaggaggtggaggttgcagtgagccaatattttaccactgcactctagcctgagcgacagagagacactccgtctcaaagaaaaaaaaaaaatggtcacatccaaacatttcactatcatggctggggaagatacacaacatcatctttaacaaattcaagaaattgaggaagtcaggaagtctgcatgtgagacacccaagttaataatttagctaaaagggcctccctctgctcttatgagtggctggcacctgcaaaggacagggatttacttttttttttttttttaagacggagtctcactctgtcacccaggttggagtgcagtgacaccatctcggctcccacctcccaggttcaagcgattctcctgccccagcctcccgagtagctggaattacaggtgtgcaccaccatgcccagctaatttttgtagttttagtagagacggggcttcaccatgttggccaggctggtctcgaactcctgacctcaggtgatccacccaccttggccttctaaagcgatttaaattttaaaagctcttgattcatgtggtttctgatgcctagtatgtgtttccaaaatcatctcaaacattatgtcttttaaggattttgcgccagtttgtaaagaattttaaacatgtcattataacatagaaatagtgctgaatcgggaatataataccctttggttacttaacaatatttctaaaatatttacttctagtaacatgaattttcatttagagttcatagagcaaacatgaatctctaaagaaaaagatgtacaagaacaaaacaaaatgagtctcttgtttttagacttgatgttattttgttagtttctcaggacagaacttcctgtgatataattgtgatgggtgttgctagtgtttgtgaatcataactgttgagccctggagttaactttttataaagtacaaagaggaatctcattggtgcatctctcttgctgttctgcatcaaaatgaaagcatactgacattgacaggagccaagtcaataaacatttattgagcagctagcttgtgcagagcactgtgctaaacaaaatagatgacaaagaggagaacaagatgttgccctttactcgggagtctatgatcttaaggggcagatgattaaaaattaaatctgatgaaaggcggggtttggttgctgctattaccaggaaacaaagtgctagaacagcacttttttcaaaccacaaagctttacttattagtaaaacacaatttttcaaaccacaattaaacctttacttattagtaaaacattctctggaatcaatatgtcagcatttaaattaatattgaggtgagcagaggattcacaaaaaacaaaacaaaaatgattggctcatttctgtctgccccttggttgcttcaagcatggtgttttttttctaatctggtgcaattggatggtggcacacctctgaaataagtggaacccctaaagctggcagctcaacatctgtgactccgtggtgcatatagaaagttcctgaaaggccagcaccaccaaaaatggcagagcagttggcaccctgggaagtgacactgtagttttgccactgcaatgagtgcctaatactcttttagtgttccagttctgccattcacaacctgtggccttttaaaagccctgtggtttccttatttataaaatgagtaggctgtgctagactgtagaatgtgtctgaggttctttctggcactaaaattctgtggaccttactgtgaagttttcataagagccaggaagttttcctccttggcttctccgcatcaaatgacccaagagaaaaaaacacattcttgagtggcagagaagtacctcgcttctttctaaaatatcccttctgatttttccacttcactaatgtttctagaaccaaccttctttctaactaagttctgtatagttcaacttgagtatcaaaggaaaaataattatgcagaaattatatgggtaaatatgatggcccagcagtggaaagttgatagtctctcgagggtgggcaggcggagcaccggacacttgagacaaatgactctccataaatgtagacggagatgatttgtaaaaaggactatttgactcagcaagtattagccagaaagaagagatacactaaacttgaacaaatcagtttaatttcccaaggcagtatctgccatggcatcctcatgttttgcacatgttgtaacagatgaaaattttagatttttacgttttatgcttccattaagccaacagagtctttgcagattttcattgtgttttggggttgttagcaaaatgtgttctattggcaaaaagatttctgctttttagtcagcatttgatgagggattctgttttgtttcgttttgttttgttttccagagggggaaggggaattagaaaaggaagccgaataatttaaaggctgaaattttaggtagttcttttttaaaaacaaaacgaaacaaaaatatcatcttcaaacaacacaattaaaaggtcctaaacttccatttaaactgaaagaactttgcaaaagaattctgatacatttatttcagtgtcatctcttgaaaggacaacattcaacggtgcacagtttctgacagccaccactctctatgacgtgcatagcaatggtgccctctgccctcctagagtcacaggatgaaatgggtcagcactctgggagcttggaggacccaatgctataccaaggcccaaatagccaagtgcctactatgctcccaccactggtcttagccttaggattcaattaagaacaaaacatggaatattcttgccttcatggaattaccttctaatgagctaggtagacaatagtcttatgtcaagttatgtaagtactgagggttatacagtatggaacaggtttcagttctttcctggaagttctcagaattactttaaatcaggagaaaagtcaccaaagaaaattctgacagaaatgatccacccacccaagtgtctccaaaattaggaatctctccgaaataaagcataccaagtgtgtatgcacatatatgtgcatgtacacatatataaggttagcaaagactaaaaagattgtgccttgttgccaaacagaactacacacaaacaactggtaacatctaggaaaacagtagtaattttccattaccttttgttgaaagagaagtggcttctcccagtttagtgtcaaaatcagagtcctagcctcagacagattcaggtaagtcacccagagtacttcagttatgttaacaaccatatgcaacaatagaagttctttggtcctactgtgcttttgcctttgggtaaaaagttacacttatggatcattgggaagagcctgtgctgtggagtcagggggtgaggggagtagacctgagtcagaattcctgctttgcctcctaacctctgaacctagaatttttcctttataatctggtgataatgacttcacttttgtcctgcatggttgtgttctacgttgtataatgcacctagaacataacttaggtgctcattaaatagtaaccagtgtgacacagtagtaagaaatggtcatcttcatttttaaagaggatggcaagaaaatggcattaatccctgtaatgaaattttgtgtatggtgcagatcaacagcttaggagtaggagatttgattggaaggtgagcaggttcctattcttcttagtttaaatataattttcccagttatataacgtagtttgtaggtgtattaggaaagagattaataaccatattgtgcctcagtttctatacctgcaaatatatggatggtttgaaagatgaataaaagtatacagaaaacttcgaagtcttgatgagagaatattgataattgtaaaggattagagtgattattgtgattacaaggtaagaattctttccacccaggcgactggaggaagacacagaaaatctatcgtattgcactgctgatttcaaaggagttgctttgagactactaaatgctgagaaattgaacactggcagtaccggctcactaacaattttgttgttttcagtttttaagttacacaagagtgggtgaaaaaaatttattctaggtgcttttgcaatctagtgggcttataatacccaaaaggctataggatcagtctgttgtcttctgcttttcttcccagctataaaaattatttctgcacactttcatcagcactaagcttcttcagggcaataagagatagaagagaaacacctggttcctctgtcaggtatatttcagttctattccccacccacattgttagctcagctttgagggccatactgcttctagtggcccctctttgttttactgccaaatgcccccaaacgagaataagcttacctgacaaaattacatctcataaattaaaaataaggtttcttccttcctgcttccccactcttcactttataccacatacatgcccacatttgtatgcatacagaccaccagaggaaggatgagaaatggaagaacagtggttcatctctaaagtctgatactgctctgtggaggctgttagtgtttggcctccacactttaaaggtatcttcaggtaacctacactatctattattttaggggcaagaatcaccaccatttcactttctctttgtgaattttctcttctctgtgctgccagtcagcatcaaatttggactgcattccaaccaaaagaacttacagtttttgttacatcactgtttagttggccctgttaatttagtttttatattaacattgagatattttgtgattgatcacaaatattagacattcagtctatagttgttatcatcaccttatttaagatgtaatgatctaatcacagtacttccagaggttctgattattaccagggacaaaatgtcctgtgcttttggtaattcccagactggtttgagggcacatcaagaaagatctcaaagaagaaaaggcaaatactacacactagtgctgtgtaaacccaaccaccataattctaattttatttgaatgtttggtggtcataaatagctacctattttctttaaggtataattcacagtggacattttaatatgcaaaactctccctgctggaaatttgcaaacataaatcaaaatgcagtcttaaagccctcaatgtaatgtaacagaagagcagaaaagcactaaaacaaaaggtatgacatttatttttacaaaagcaatagacacaagatggataatatataaacttcattcgtgtcctacttttgtgatctattgttatctgaaacattaatttcatatatcctgttcctctcctctgtaatcacagtttaaaaacaacttggattggcaccttttctatttcaatattaggatttttgactagtccagagccaaaaaatatgcaactgttatttgtaattacctgtaaaacccatgtagaattcactgtcactaaaccagaagttcgcaattgagaaactgaaccctaaaaccactgggacctagatacctgttaaattaacttttatagcagttaaaactttaataactataagctgtttacctaaaaaatttgctgccacgtttgctatgaaaatgtcgaggacacatcagaattacctttcagaagtcatgcaaggaacaatgtttccccctaggagtagtaagagcacattttccattttgactttcttgccagacagcttggaatcgtatctgaacctgaattatagtaactgtctgaatatatataaacatagtcataatatatttcctaatcatgatttttgtttattttcttttataatacttcgtagtcacgtcaacgcaatctatttgttctacatcgtttctgatctctcaattttagtctaatatccctgggtttacacatacatgtttttcttgtgagtcaacacaaattatgtgggaagcaaatagagtttaattaaaataaataaaattatattgttgtaatcatcaacctgcaagaaatactaaaatactgatgactcggctgtaatgaaattaaggaggactgatattatcagtccccccccatcctgtttaaaaatgctttctcgatttaaaacaacagcagtaacaaactaaggaagaaacatgttgatcaatcattcttccccatctccaagctttttttcttcctaaagaaaaattaacagaaatgttaactaaatttttttaagtcccaaatcctttatataaaaagtcttgataagttgttgtagacaaaacccattcttagaatttatcagtcagttgttatatattgccctgtgctagttatttttaagagatcaaaataaaattcacttctgacagcccaaaatagttactgacattgtaactaaagcaacattgtaactaaagcctactttgtacagctcacctggcagagcagggtctagaaacagttctgatgtaacctaattgtgctaattactgtacaccccttctgtgagtaggataattgtcatactaacagttgccatgaaagtagaacaactgcagtgaagccattagatgatgatctctgactaccttaaatgtatgcatgtatgctgacatttaagaggttatctgaagtcaagcagtatccatttttccaatgagcaagtaacgatatatgtagtagtctactaagatgagaactttagtcctgttgcgcaaaatttctgaacacatgattattaatatgcagtcttcataacatctgagcagagagacatgggaactttggctcctatcctcatccctcaaattatcatctgggagccatttttttccattttttcattcagcctatagttatttatgcatttttctcatctcctcaactaaactagagtctcctgaagtcaggaactgtattttataaaatctctgggttctatacagagccttagacatggtatagacagacagacagaccgacaaatctacttaagaatgacctgggtttcattttaaagtcatacaaaaatatatctttgctcaattagctggaatgttgtattttttgaaaacacttttaaatggcaataatcagagacatattactctaagacaactacttgagatatcttagttcccaaaaaggttctttgtaaaccaggaattaactatttttaatatacttggatctgaagttttaatgacccacacttcagtattctgtcaactgctccagaatcgttgtcatagttacctagtatcaggaacataaagctaaataaatttcaatacaatcttaacccattgcaatttctgaagtgatacattttaataggttttgcaacatcagaggcctccataaaaatccatgcaaataaaataaaagattacagacttgaatatatgctgatgtttttcaagaaatagaaatgctttcaaatgagctctcacctagtgaactaattttaatttgttgatcatgtttcaaacagaaagttaagattcatctaggaatggtaataatgctttaattgtgtgagtgggttgaatcagataatgcagtatcatttgtaaagagttcttatgttttctacaggtggataagtggagcagctgtagtcaatgcattttactcttcaggaagaaatcagataggtaaggtgtattcttaaataattatttaatatttctctatcgttcccaacctgtagtgcattgtatgaccaattacaatacctctaaacaagcacagctgaggctgagttattgctctattgaatgcatttcttgaaagtaaatgcatccgtgtaccttctttcactatagtgggaaaattcagattggtacaaatcacgttaagtagttttgtttcttttacaatattcttatttatatctaaaatggtttatcttatttctaaatatttttattttatttctaagtaccttttttaaagtcccttgaatatatctatataaagtcatattgactttaagactcattaagcattagcttcttaaagtggtttaaggtttcaagagccaacttttcacagatccagtcctcctggcaattctgtatgctggctctgtgagagatgatcctattctatgtcatcttcattcaggaaggctccaaggggtttagaaagttggaatctcaattatattcgattgaatcgtatgaaattgtatttacctagccacaattgatcaaaaaagaaaaaatttcgtaagttcgcttatagtattattacagacatatatatacattaacacatgaataagttatcatatatgatgaataactgaatgacataatatgacaaaaatattttcttcttcttgggaaggcctggacatctttgaacatacattggctcacatatatcacttatcacatacattggctcattttttttcagggggtttttagcattagaaaggtactcaactgattcagtactgccagaaatattctaaacaaatagtagagcaagcttctgcaggtgcactcagttctccaggtacactcagtcctgcccttcatttctaaacgtggtctagaattaagagagatgataatctcagcattattctaaaccattcttcttatagctcagagtctgttgtaagcctcatttttattgaattctattaccaattagattagaaattataaaaaatcttacaagatatttatcattggctaaaaaaaaactaaccttaaaataaattgtatatttttaggttaaagtttgattatacctttccccgttgctttcaagtctaaaaagagttaggttaagaagttatctacagtttcttctagtatttttatgatttctatttttggagtaaaacctgaatccatctggaatttacgttggtacatgacctgaaactgaattatataaagtaaccagaaaagactgttttgtataacatataaataataagtaagatatgtttacttggcttaaaattacttagctcaaagtctaagctaatgctttctggctagggaaatgattacccaaacccataccagaacgtgcttaataatcaactcctcagaacctttgcagtcagtcctttataatatattatttgaaaccattcaaatcttgttttaaaatgcctttatctctagagagtcttcactttgaagccctctttttaatattcagtagttctgtcagtgtctagttcatttggtactgagacaaacgtaataattaactttcaatggaatcccaagtcaaagcaaggcaacttagactccttagtgctgcattagagcagaataagggatgcagcttcatttcagtccagcccagggaggaccctggatcctatcggagctcatgctggtgcatcctcagtaggaccactctggcatgttcagtccttcagcccttctctagagtaggctcaggcatttatgccaagcaggaccttgtttgattctgaattaccccaagcccctggaggtggctccaaattggcccacttcagggattccccgatcagagaagagctgaaaatattttcattttgagtataatgtcttgaaaccaaagaagcacacagaaaaaggaaaaagaaggtaaaagtggcccaatagtggtctatttcacaaaataaacaataatcctctggtaaatcaagaattagctataataacaattctgaatatataaaaaagaccttttccaagatccttaaaataaggatccaatggaaatataaaataagaaaacttgttaacctcttttcatatgcttgcctggttcttgaacagcagaagaagggaaatccttgaaatgtacactttttttctttcacaatttaaatcttcaaagtggggattgtcttaactaaaaatagttgaagagtcaaatctccatcttttttcttgataggaatgtttatgtgggctgggtgtggtggctcatgtctgtaatctcagcactttgggaggctaaggtgggtggatcacctgaggtcaagagttcgagaccagcctggccaacatggtgaaaccccatctctactaaaaatacaaaaattagcccagtgtggtggtgggtgcctgtaatcccagctactcggaaggctgaggcacgagaatcgcttgaacccaggaggcagaggttgcaatgagctgagatcatgccactgtactccagcctgggtgacaaaacaaaactctgtctcaaaaaaaaaaaaaaaaaaagaaagaaaaagaaatgtgtatgtgtatataaatacacacatacctacctatatacatgtcttctgcaacactgtcttaatggatttgggataatgtccattataaaattagggttggtatagagtaatatgtgccacgtaagtgagcccctccctccatacacacacatagacatacaaatactccaaattagactgcatacactttctcacgggattggtcattttatgttgttatgttaaaaaaagaacttgttttgttatatagagacttactcatatcaataatttctacttcttaattcagttttcaccattttgttagaactcacacatgtaggctacattccaatttgtatgcattcctactcttcatatcaacaaaaaagtcaatttccaagaaagaaggcaaactaaaagtgcttaatccactgttcctcttccttgcatgtttacttcatggagctctagaaggcccctgtgccatgacattaggaaagctgcgcttcaatgttttgtcatatggttctctgtaagttctaggtgctgttcagtcatcttattaaaccttaaaatcgcagtcaaggaaataatttagtgtattctcctttttcattaaaattgcagaaaggatcttttaaatcaatttttttaatttctcaaatgtgtaagttcttcagtgtgttcagtctgtgtcgactataaataccttgagatagttaaattttctaaattgccttatttattcttaggagttttattttcagacttgaaaattaagactgtttccaaacatattgttactccatttaatataaaaagaatgtttagactatgcatggtggctcatgcctgtaatcccagtagtttggaaagctgaggtaggctgattacttgagctcaggagttgataccagcctgggcaacactgtaaaaccccatctctaccaaaaactacaaaaaattaactgggcatggtggtgcatgcctgtggtctcagctacttgagaggctgaggtgggaggatttcctgagcctgaaaggtggaggttgcagtaagctgaggtcacaccactgcacttcagcctgggtgacagagtaagaccctgtttcaaaaaaaaaaaaaaaaagaatgtttaattattttccaccaaaaaaattacttaattgctgccttaggctacatatgaaatattctaaaattgaattgctagcagccttcagaaaataaaccacagaagttgtgctggggaggcaaaaacagggggaagaggagacatggtcttttgcttcatggcccaatgacttatttaattaactaacttgttgacaatcatgaacataaaaaatgcacaactaagcagttggttataaacaacagttgtgatgcctactaggtaacagcaataaggctagtggggaaaatcctccttacagagatttagctgacaaagtaaaaggggaggtcataattagcaaagttgaacttgaagactaatatttaataagaaccataaaatcttatcacttgcctgaagaatggcatatcagggtatgattaaagcagcaggatctttgtagttaatatttagtcttgatagcacatttcataacagcattttatataatgggtggattttaatcaaagtacatagtgtgggagatagtattcactttaacttaataaagtactgcacataatttttatactttaaggtaaaaataagttcatggctccatttagctcaggctgctacacgtgaggtataactttcataaaaattctctaaagacaaaagtacttttttgttgtcgtgtcatttgaatgttatggcaactttccaaatttttgtagaggtctggggagcaattaaattgctcagatgctttttgaagtcttctctgtaaatatctaatatttatccctgaagcccatgcaaggttatactgtgttcagcccacctgaaagacaaagaaataacatgtgctactctgtgttaactagatcttaaatttcttaaggtcagggcccttgttttattttcttaatgtcctgcatagcaatgacccagggctttgcacttaataggtattgatactgaagggtttttttttaattacagaaagtaacgtttcagttattcagtggatgctagagttttaagccattaaagatagaattactaaactatgaacatttaattaatttaattttaatttctttctaaggtcaaagattagttacctccaaataacatgacccaaaatttgattaaacaggggaaatatattccaagggaagatactctccatcttttattagtatttaagacacattattagtatatttcagaaatagtgaaatatatttcatgagagtatatattataagaggatactggaatggggcagggaaggggagggtatgatggaggtggagaggtgggagaggaccctggggccataggccagaaagatgtgtttagctagagagcaatggtaagccttccaaagatttttagcaggagaatgatgatgcccagagttgtctttaatctggctacaggatagattcagagagtagattagatttagaatagattgtagttgtgtgagacagaaagtgggagactgattaggaaattaagtcattcctgagacaaggaatgagagtatgtgtaaacagtaatactgacaggagaagataaagatgctcctgaaagctacctcacccagcctctgcctaagcagacttgtaaaagactgtaaaagaaaggaggcatctaagataagtagaaacatttacttttgctgatagagacccttcaagggccattagcagaaataatacaaagactgagggcctagaggggaaaatgaatttgatgtttgatgcattaaatataacacatttgtgagacatctgaatggagaaagttagcaagttaatgcagatgtcagagtagacatactgaaaactacaattcatttatttattcactaaactctgtaggacacattagtaagttagggtgatcattcatttatttatcattgattattcattgattcagcacatttcctgagccctgattatgttccaggtactattctagttttaggcattgttcaattttaggcatttagataatgaactagaaaaatgtatgaaattaaaaaataaacaaatatatgtacagacacagaaatctctgctctcaaagggctaatatttgaggagctggggtaggattagggcagacaagaaaaggaaggactgtgatcataaagaaataaatagaatatgaggtagtcataagtgccttgatgaaaataaggtaaggttatgtgattgaggtataccttcaattgagtggcaatacttatttaagatattattgtagatggatacaatttctgcaataacattaaaaataatattggtgttactgagtaactatttcttccaaatatttataaggcagaaaggaccttctgaatgaaggttataacttccctttgcttcaaactccttacagcacaaaacaatcttggattgtaaagtgaatcgtgatgataaatcatagtttatagcaccactccaaggtgaactctgttgtcatccataataaaatgcctgcattggtttctattacagaaggtttttgtatataactaagtgaaactgacatagtgaacagcagcttagcaagcacaaagccaaccccaagcctgccatcactgaataatgccatggtggcatgcgcctgtagtcccagctactcctgaggagggaggactgtctctaagaaaataaaaattttaaaaacttatgccacaaataatctctaactatcttctctccttgtagtcttcccagccggcattctgcagccccccttctttagtgcccagcagtccaactcattgaactatgggggcatcggcatggtcataggacacgaaatcacccatggcttcgatgacaatggtaaagtgcagttgacattttcctttggctgaggtatatgctcataaatttgattaagagttattataatttattactacaaagctacatttattcaaacatgtatcatttctctaattttcaccacactttcaattttccctttaaattgttgcttaaagagatcagaaaattctcatagtgagttaagcaatgtgtgctttacactctggcagaatgaagtaaatattcccattgggaaaatactatggtgtttgtcagcggcagtgataatactaggtcttagtttcctggttgtatatgacgtatcttgtcatactcttaaaggacaggctgcatgtctatgtcttaaaatcagatgtaaaatcagaaaatattgcctctccaagagctcaaaagactcttaagctgcttaagagaccttttttttttcgtcttgtacctactacctagttcaagtctttgcaaacagttaggcacttaaatgccaccctaaatggaaaaatcaatttagagtttcaatcaaagctgaattcctgagaggaataaagacgtgaaatatgtaaagaggtgatagttcaatctatgacaaatttcattcacaaatggaaagtagagaacaatagagagaaaatacttaatccccattttagagagccagagaaagaaaaagagacagaaatgttagaattcttaaaaagacttactaagtgtctattaactcaaactatgcaacagtctttacaggtaggttctaatactgtttctgttttccaagtggaaaaaaataaaaacacatgaaagatttgcccaaaggtaacaaagataggaactggtagaaccagaaggtgaattcaagtaggttggctacatagcccttttcttaatcactacgtcataggcaaatatgaaaaagatggtaatattgtgtcaaaacacatgatacatataaatgcaattggagctcaaaagggagaaagatcgatgtagtttgtggttggcaaggaagctgtaggagaaaaagactttttttgtgtgcttgaagtagagggaaactatgagtccacagtgtcctatgaagggtccaggaatataaaaatgccagaataaaaatgttggccattttaaaaatctcaaaatatcaaactaaacagacttgggtcaggtaaaaaccattcaacagaacaaggcataacttcaagaatattttgtctggcggcctcttctgagatatcaagagccaaatgggtgaaatgtctgggtcaatgctgagaagcattagcaaagaaagctctggcagtccaggctttgccaactctgtgatgaggagggatgacagtctctctcatcgtctgcctaatttaatgttctgtcacacagcagtatttcagtccttgcactttgaattaaacatatcttataattcttgttgcaatgagttcccattttacttaaataaatatattataggcagaaactttaacaaagatggagacctcgttgactggtggactcaacagtctgcaagtaactttaaggagcaatcccagtgcatggtgtatcagtatggaaacttttcctgggacctggcaggtggacagcacgtatgtcattagcattctcttgaaaagttttagacatgttcaatcttaagtgtattattggtggtttctttttttaacaatcctaataaagtgtcttttttaacagcttaatggaattaatacactgggagaaaacattgctgataatggaggtcttggtcaagcatacagagtaagtaaaaaagattttctttccattttagtgatttagagtgtttctcatatttaataattcatttaaaaccttttgcaaaaaaagaaactcatataagcagtaaatgatgaatagaaaatggaaaaaaatatgagaagaaagagtggtgaatatgctaaccataagggtcaatacattgatgtgacggagctgaacacttaagtttgcaaagagccaagaagaagagaaaatatggaatattatatcagctgaaatgaggagagagcaggttcacaaaggaggcaacatttttctaagaaataatctctggaataatttttttagaagaaatgtcccataagaaggattatttcagggtctttgaccaatataagaaacaggaccttcagttttgtagcaggtgaagtagcatttgggaacaaaaatcaatgtaaaccacaggcatattaaaccatagttcatatatgatacagtaagggactgacgtgatatggttccagcacatggccttgtagtcaaccacactattatacacagaggactattaacagtggagcatccgttagaatcccatttagccttccattcattcttgcattcaatacatattcattgaggcttaataggtttggcagtattcaaagagctggagataaagcaatgaatgctttatgaaaggtcattatttgaggatctgagcaagggttaaaaaatagtctggtggatgccatgtgcataagaaaaagcagggaatttcataaaagggtggaggaatgatggtctaggaagcaacaaaaaggaatgaagatgattttgagtgtttttctcaactatgaagtagcccatatgtaggagaaagagcagcatctacttgagatgtcacaaggaacaacttgttcctaggctagaactaggcttctctaagacaaggatggatggaatgatcagtggagtgaatgaggatgtagaatcatttgttcattatagaaatgtttggattagagtggaggaggtgaacatcaatggttggatcagggaagaggaagcaccagagaagtggagaaagaggtgactgatggggcctgcagtttgtcagtgaccaaagatgatcagagtgtgaagcttgggagattaagtcagctacaaggtttccaaaagaatgagtccaaccagttccagggacatgggagattgctgctactttgaatgtttagtaatttttttgttcgatgccagacattatgcattttacctcttttttttgagatggagtctcattctgtcgcccaggctggaatgcagtggcacgaactcggctcactgcagcctctacctcctgggttcaagcaattctcctgcctcagcctcccaagaattgggattacaggcatgtgccaccacacctggctaatttttgtatttgtagtagagatgggatttcgccatgttggccaggctggtctcaaactcctgacatcaagcgatccacctgccttggcctcctaaagtgctgggaacacaggtgtgagccactgtgcctgaccgcattttacctctttgggtctggatgttcttttgttcctgtaaatattcttgagctttattctaggatacagttaaattccttgaaaatggtttgatctttttgggtcttccttttgtaacttttattggttgggatggggacagtgttcagtctagggacattattctcaactgctgagataagaatctactctgtgaatcttggggatttccattcttgtcctgtgtaagtaccataaattattatctctaatccttttgagatattgttttcctagcattgggtattttgctcacacacatcttcagatcaagactaagctgaatgcttgaggatgaccatctgtaatctctgaggttctctttttgtgtagctttctcctctttagtaacctgttcttggtgtccctgaactctcagctccttatcctcaactcaaggagtacccccagctctgactggtttgctcctatgatatggcctgaaaactctcaggacaataagctcagcagtcatgggactcactgagagtaaagtttaacatctctcaggggtcattctccttttgcctgatgttcagtgttatgcaaaccattgttttaaatattttgttcatcatttagttgtttccacaagaagttaaatccagtccctatcattccatcttggctgaaagtggaaggcattggcactcaatattcccatggtgattctaatacacagccagattgagaatcactgctataaaatccagccaaagttgggattgatagtactcccatggagaacctcacctagagcaagtacagaattgttaatgatgaagcaaattacaattgtgcaaatattttattacactttgaaaatatgtaaattcttaacgtgtaatgccttgcccccctgctagattgcgagctctctaagagggagcaggtgcaagcctttcccatatccccagcatctttacatagtagaggttcaataagtctatgttgacggtaagtggaagaaatgaaatatattttctgctcatctagttggtcacattcctttgtattaaattggaaatgacacatctcagaacgtttattatgaattcgttttaaaagtttatttagtagaggaaaactcatttttttcagtagcataaatctttaagaattaagaggattttctgacattcaaattacctaaatattttccttcaaatgtacctgaggctcagtccattttgtcctgtcttcaaaagaccagaatagttgcattttattatcctcagactcattggagactaggcctctaagggatctcaagagaatcctttgacttggcaagaatcactcgatcttagtctggtgagtctattttgctaagatagtagtaactaagttaaatgtagcaattgcagacttccttggcaattcatttgtcctgactggtcttattcatcaatttataaaacaacatttagataagtttttcatcacttatttaggtcatccattcattcagttgacatttattgatcacttgacatatgccaggctcttgtcatctactattcagtagcttcttcttttcaaagcatttgtaaataaatttgatttgtctttctaatccataaaatagttgtaggttaccataactaaatgtattatcagggtgattttaacataaaatgttaattacttggtggcatgatcttttacataggtttatatataaccttaggaattaatattattgtttttctattttatcaactgcctaggcctatcagaattatattaaaaagaatggcgaagaaaaattacttcctggacttgacctaaatcacaaacaactatttttcttgaactttgcacaggtattgtgtctttcttgattgatagatatgaaaaccattttgagttataatttcacagtaagttagatgtcacatgctgagttcccttgttttacagagcatttgacttgattcactttcattgtttataatagactgttggatcatattaatgataaataactatgttcctggttgcctttcattgaacattatttgaagagcgaatggttgaggaatgcagaattccaatttaatttttctccttcccctcaacttgctcaaacaaataatccttgattgaacctgagtacatgctttgcttttcctattcctatctctaggtgtggtgtggaacctataggccagagtatgcggttaactccattaaaacagatgtgcacagtccaggcaatttcaggtgcgtggatatgaacagcaatcaaggtgctcttatattgggtccattgcttccacatttggaatttagacttttctaactctgattcttttacatttggaaattcagtgcttttttttttttttgagagtcaaaggtaggatcgagagaacacatcggagcattctacataagcatagccttggccactctctttcttagaatctacaataattataattccttagaatctacgaggctcagggcttgatctattccaacaaagatgtcgcctcagaacagtggctcaatttaaagctagaacaaagatatttctaagaggctgtgaatggtttaggcccagacccaatgagctccaacttgcaaagaaaaatttcaatataaaggaaactttctactaattagaggttcttcaatatggaataacattattcccaaagcttcaggagagagtacattgaagcacagcccatcaaggatgtgagagaaaaatgctctacagagtagaaaactgagctagaagaagttaaagttcttcccaaattagaaaatcaaagagaacaatgattgaagagagtcactccaaccaacatttgaatgttaaatcatagatcctatgtatttgtttaagaactgaattcctaatgctacccctttcccatgtactagaacacttagtcactcatttgctgatcaacaacacctctcaggcaagaaagttaaaaaaaaaaacctaaaaattttgtagggtagttggaaaatgaaatttgagaacaaaagagaactaatgggctaaatttcaaaagctctacataaaatgaatgtaagcatactgcccagatcatttactcctgggaaaaaacacattcgattatggagaaaaacacatttaattatgaagcaataaagtagttcatttaaaaattaaagaatttattcagcttgctagtatcatcgttgtcatcatcatcatcatcatcatcatcatctagtatttgccctaacatttctttcaatattcattcactcaataactgcttatggtatgcctattatctctgtaatccaagctaaatttagttctgctaagatattcaaattaactgctttataggtaatgagcaacaaaagtgactggattaattcccattgtggtttattcaaaaaacttttagttttaatttttttaaagttgtctttttccttactaaagtgaacttaagctttgaggtaagaaacacttgagttccaaccatggcttcaccatttactagctgttaatgtaacctctgtacctcagtttcttgatatgtaaaataaggattaaattatcatgagagttgctagaggattaacgttaatataaatgaagagcctattttgtgtgtgtgtgtttgaaagtccatactaggattatttgtagacaagaggtatgaacagaataagaattcttatgcattttgtaatagttccctatcagtcaaggcttttttggtgctcatttcttatgttctgcacatttcagaatgttagtaactgatcagcagttaagtaaaacgtacataagtatataactgttttctagctccaattttaaactgaaaacaatattttgctataaattagttaaattatttgtatctttaagtctttattgttgttctggttccaaagatccctcatcgactatttttcattcataacaacagaagcgtgtgtgtgtgtgtgtgtgtgtgtgtgtgtgtgtgtgtgtgtgtgtgtgtgtgtgaagggtaaatggaatgggtaaatggaatgccaaccttttgtcaaggaaattattgttttctctggaggtaaggagattttcttggcaaaaggttgagcttacatttagttttggaaacaggccacttcctggctgtacaaagtaaaacatattttttaaaaaaactttaaaaattaatagatatcgagttgctatttaagaattgtgcttggtggttatatagaaatatttctgaattagagagagatttgtaaccttatgtttaaatagccatagtattaaaacaaaaggcaaaatacacttgatacaaagctgcatcataaaaccatatttgctatgtctaacctattgttgttttattcttcctgactaaagctttatttatgtactttaaaataaactttagaagttaaggtataagaatctaattctaaggatagcagctagcatttataagctcataaaaaccaccatgcaacctaatttgtcaagggtttgccctgcatatctccataaactaaaacataagtcataaaaacctaggtgaatttcagtaatattattgtaatacctagtatatctaccatcctcagagaatgagaggttgcaaattaagttttgataggtaaagtttgtctcttttaagtattaacatttttatcttaaccactggattaaaaattatctattaaaaacacatttctaccttcctgccttaaaacaatatcctgaaaaaaaaagcctaaccttttttaaaattttgatgacacagactactttatgattattagttatggttttactgtttattaatttagtctgtggagctatttattcttataccaattgtgatgctttttgacttattttgggtttttattagggtttttctgtgtgtttgtttctttcctagttttctttcctattattgtattgcctgcctttagttccctaattcctccattttgattagctcagaaaacattttgttaaatttaaatggtatttaatccaaaaacattcttcttttaatagtctagaaattgaatctataatttaaatattgacttcattttggaaatccagtttttggttagccatctatagtcatttcagggaatatttattataatatttatatgtaatctataaatatgtttctaaaattatttagctgtaattttctatataatatgtaagggtctgataattttgtaaagcaagtccaaatagacaaaatgatttaggtgcttagattactcaacattatcttccagtcaggaagaaagggcacttttagaactgacaccactatcaaagcaagaaatgtttctcacagcttaatttctaatattttgaaggaatattttgtctagtgttttatatagacatgtcaactaatatggctattttgttccttcataactctgtaatttagcatgctaataagccctctttgaaattcttctgtttcttccatttcccttcaatattagcattggttcctgatatttatagatatcaatatagattttagtgagttttgcagaatttctgttagcccctccaatctttagctgataactagaaatctattacagcatttatttatttatgactgtatagcagaacatacactcatcaatatgactttgctttgaaagaatcataaaaattagttaatgatgaagattggataccttattcctgaatgaaggcagttaactatgtagccaagtcattcatttacaagaattaacaaaaggttgtctgaggacccattaattgcaaacagtaattcagaagtccaattgtagtaggcaggaatagtcagataggatataaagtccattcttggtcccaatgccaaatctcttagatgtttttaatgcaagtaactgtttgccaagggaataaacatcagcagtacaataagttattttacataataaagtaaaaatttcaagtaaatcaccttaagaaataattaataaaagctttattatcttctgttattagaaacacaagcacacagttttgtaaagcatgaaaatcatgtacatatcttctaataacagaggataattcatgtaatgtgatctcactcttagaaaaaaagtgttttattaataatggattcacttttcaaaatagattatctaggcctggcacagtcactcacacttgttaattccagcactttgggaggccaaggagggaggatcacttgagctcaggagttcaagaccagcttgggtgacatagtgggacctcgtctctattaaaaacaaaaaaattacccaggcatgctggtacatgcctgtagttccagctacttgggaggctgaggcaggaggattgcttgaacccaggaggtcaaggctgcagtgagctgtgatcgtgcctctacactccaacctgagtgacagagcgagaccctgtctcagaaaaaatagatgatctattcaaagatttgatgtcataaacaccaaatgttaactaagaaagtaagtgaagccctagtgtgttgttgatctattcaggatcaaattaggtagagtctttggatggaaagaggatgggcagaatgggcatggagagctgagtgcacaccaggctgagtatttctgcagtgcccactctctgcggtgttatctgaagacgtttctttcttttaggtgttttttgtttgttgttttaacttaattttgagatttataaatataaatcctaaaaatactttttaagaaaaatatagaattaagtcgtgggtttggacattattaccgaagtacttgttcccatatgataaaatctaagaaaaaatcctttggaaaaaattaataaaataaaaacaaaaacatgcagctcttccagtcagtgatgctgatggcttaccctgtcaaccagggagcttgctccctagtgtgaggaatgcccaggatgacaggatgactgtctttagccagtagctaggcatcctgaattgggaagaaggttgcattaatgaatcaaagctcctctctaacataaagaatccttgagtcccgcaacctgaaagactaaagaccaatgcaaattcctaatttctaagctcttttaattcctacataaacagtcacttttgactacattatagaagtgatttttttttggctcatgaacaatggaaatttgtttctcacagttctggagaccggaagtctaagatcagggtgccagcatgatcaggttctggtgagggccatcttctggtttgcagactgcagacttctccttgtactctcacatggtccaaatagtgaatttgtttttcaatatttcagatgtaagaaatggacatttgtttttttcaatcaaattaagccaaactctgagctcttagaccaagctaggagatgagccatttactttcagtggtttttcaacgtactctttcagggttattcaggaatctgatatcatcacacaggcatagaaattagagaatagcctccatcttcagcccaccgtggtcactgctgagatccctacagtccaaatgctccagctggagtcagtggttccatttccttccaatgctcatgagctccagagcctccactcttcatgtccaggttctccaacaaccacacgccatgctatcagagggcctctcggggccttgctcagagcaggaagcatcttcttgtcattcacacaacctgccattactggaacctaccccattcttgggaaggccaatcatctccctgacaagtggactaatatataaattccccagcttctgactccacttcacctcaaccctcccacaccaggagattatttttcgtctttaagactcatctaggaatcctaaaaaacaaacaaccagaaaagattacatcctccatgaaagataggagagttgtggtggagagggatagagaagttagttgatgcgttgatgggtgacatattagaaagtcagacttacaaaaaatccatatggatctctcttttctggaatgaggaaagggaaagaaaatgctttctttctcttccagttggtccataatatcaaacaaacaacagaaacactaagtcgtgtttttcttcctaataccctattgcttctctacaggtaatcactgtgaccaaccaggtcacaggttaattcattcagtatgtactgagtcctgtgctggactttgggggtgcagcagtgagcaagacatacacagtacagcatcttccctcagcatctgtgggggtttggttccaggctccctgcagatatcaaaatttgtggatgctcaactccttgatataaatggtgtagtatttgcatataacctatacaccttctccctcctatactttgtcacctctagattacttataatacctaatacaatgtaaatgctatgtaaatatttgttatactgtattctttagggattaatgataagaaaagtaagtccatacgttcagtagacaaaatatttcccccacatatgttcagccgcatttggttgaatccacagatgtggaactcaaggatacaaaggctgtattttgccctcatagaaattagtctagtgggtgtgtcaggaagtaaaaaaggagaacaaatcattgtaaatgtggtaagtgctttgatagggatagtccctgtaagaggagttagtttagatggcattcaaagaagggggccaaggaaggaatatttaagcaaaggcatgaaggctgaggagttagccatgtactgactggtgagtaactttccagggagtagggtctgcaggtagcaggaagctctgaagagggacagggtttggctggtttgaggaactgaaggtaggtcagcatagtttgagcctaaggaggaacaggaagagaaatgtaccacgaggaggctatagaggagactggagccatcaggaggacattggaagccatggacaggagtttagatttccttcaagtccatggaaggttttaaatctgagattatggaatctgatttaaattttacagatcattctgactgtggtgtggagaatggttggaggagagagaagtcctaagatgtacacacagtagtacacctgccacgtagggagaattccataaatcaaaatggactcacctgtcatttgtgcctagtccttccaaaccagtccacttgtctctgggcccctcctcccaacccaagcaaacgtggtaggctggccttagcaggaggagaagggaaggaggtggttcagggttcagggtgggtgtgaaaacatcacctctgcatcaatgtactgacccatctctcccctcaaacactgctaggtgcagatagtgagttggactgtgttgtttttgcccactggggtcagagataagaggaaaatggcattttgccagccctttccagttattcaagctgaatccagcttctgatatttaaggagcccttttggaaaaaaggaaaataatcctctataaaagcaacaaaaaatatctatttaaagtctattatatttaagtcattatgtgagccctttcaagacatagtgagaaatcatgattatattctttgaccaaactcttattataatacaactccaaatacctgcattttcaaatgtgaattattcatgttttacaaacacatataatgcttataaattattaactctccatgacaaccttaagatgcatgttctattgtgcagaaaccaaggcacaaagaagcttcataagcaggattcaagccatgtagtctgtctcccaaattgcttttaactcctgttctttgttacttctccatttaaaaattctgttaatgagaaggcactgactcattgtaccaggttattttaagtttaactttaaattccaaattcattcacttgacctgcagagggaaatgcttcagggctccagtgtggtatggacgtgagtatcaaatgctgacggtgactttttttgtttgtttcaaaggattattgggactttgcagaactctgcagagttttcagaagcctttcactgccgcaagaattcatacatgaatccagaaaagaagtgccgggtttggtgatcttcaaaagaagcattgcagcccttggctagacttgccaacaccacagaaatggggaattctctaatcgaaagaaaatgggccctaggggtcactgtactgacttgagggtgattaacagagagggcaccatcacaatacagataacattaggttgtcctagaaagggtgtggagggaggaagggggtctaaggtctatcaagtcaatcatttctcactgtgtacataatgcttaatttctaaagataatattactgtttatttctgtttctcatatggtctaccagtttgctgatgtccctagaaaacaatgcaaaacctttgaggtagaccaggatttctaatcaaaagggaaaagaagatgttgaagaatacagttaggcaccagaagaacagtaggtgacactatagtttaaaacacattgcctaactactagtttttacttttatttgcaacatttacagtccttcaaaatccttccaaagaattcttatacacattggggccttggagcttacatagttttaaactcatttttgccatacatcagttattcattctgtgatcatttattttaagcactcttaaagcaaaaaatgaatgtctaaaattgttttttgttgtacctgctttgactgatgctgagattcttcaggcttcctgcaattttctaagcaatttcttgctctatctctcaaaacttggtatttttcagagatttatataaatgtaaaaataataatttttatatttaattattaactacatttatgagtaactattattataggtaatcaatgaatattgaagtttcagcttaaaataaacagttgtgaaccaagatctataaagcgatatacagatgaaaatttgagactatttaaacttataaatcatattgatgaaaagatttaagcacaaactttagggtaaaaattgccattggacagttgtctagagatatatatacttgtggttttcaaattggactttcaaaattaaatctgtccctgagagtgtctctgataaaagggcaaatctgcacctatgtagctctgcatctcctgtcttttcaggtttgtcatcagatggaaatattttgataataaattgaaattgtgaactcattgctccctaagactgtgacaactgtctaactttagaagtgcatttctgaatagaaatgggaggcctctgatggaccttctagaattataagtcacaaagagttctggaaaagaactgtttactgcttgataggaattcatcttttgaggcttctgttcctctcttttcctgttgtattgactattttcgttcattacttgattaagattttacaaaagaggagcacttccaaaattcttatttttcctaacaaaagatgaaagcagggaatttctatctaaatgatgagtattagttccctgtctcttgaaaaatgcccatttgcctttaaaaaaaaaagttacagaaatactataacatatgtacataaattgcataaagcataagtatacagttcaataaacttaactttaactgaacaatggccctgtagccagcacctgtaagaaacagagcagtaccagcgctctaaaagcacctccttgtcactttattactcccagaacaacaactatcctgacttctaatatcattcactagctttgcctggttttgtcttttatgcagatagaatcaatcagtatgtattcttttgtgcctggcttctttctctcagccttacatttgtgagattcctctgtattgtgctgattgtggatcttttcattctcattgcagaataatgttctattgtgggacttattacaatttgttcatcctattgttgatgggcacttgagaactttccattttggcgctattacaaatagtgcaactatgaatgtactgcatgttaccatcttacttgagcctttaatggacttatttcttcaaatccttccaaaaattattataagcattgaaattatagtttcaagccaactgtggatacccttaccctttcctcctttatcacaaccaccgttacaagtatacttatatttccctaaaatacatttaaaacttacctaagtgacatttgtagttggagtaataggagcttccagctctaataaaacagctgtctctaacttattttatttccatcatgtcagagcaggtgaagagccagaagtgaagagtgactagtacaaattataaaaagccactagactcttcactgttagctttttaaaacattaggctcccatccctatggaggaacaactctccagtgcctggatcccctctgtctacaaatataagattttctgggcctaaaggatagatcaaagtcaaaaatagcaatgcctccctatccctcacacatccagacatcatgaattttacatggtactcttgttgagttctgtagagccttctgatgtctctaaagcactaccgattctttggagttgtcacatcagataagacatatctctaattccatccataaatccagttctactatggctgagttctggtcaaagaaagaaagtttagaagctgagacacaaagggttgggagctgatgaaactcacaaatgatggtaggaagaagctctcgacaatacccgttggcaaggagtctgcctccatgctgcagtgttcgagtggattgtaggtgcaagatggaaaggattgtaggtgcaagctgtccagagaaaagagtccttgttccagccctattctgccactcctgacagggtgaccttgggtatttgcaatattcctttgggcctctgcttctctcacctaaaaaaagagaattagattatattggtggttctcagcaagagaaggagtatgtgtccaatgctgccttcccatgaatctgtctcccagttatgaatcagtgggcaggataaactgaaaactcccatttacgtgtctgaatcgagtgagacaaaattttagtccaaataacaagtaccaaagttttatcaagtttgggtctgtgctgctgttactgttaaccatttaagtggggcaaaaccttgctaattttctcaaaagcatttatcattcttgttgccacagctggagctctcaaactaaaagacatttgttattttggaaagaagaaagactctattctcaaagtttcctaatcagaaatttttatcagtttccagtctcaaaaatacaaaataaaaacaaacgtttttaatactattgcttttatgcctagtcaactctg

1. Method of in vitro diagnosis of pathologies in a patient comprising the following steps:
a) obtaining a urine sample from said patient,
b) detecting, in said sample, at least one marker of said pathology and at least one specific marker of the urothelial cells and/or the urothelial microparticles, and
c) determining a threshold of expression of said at least one marker of said pathology by normalization of said marker of said pathology by said at least one specific marker of the urothelial cells and/or the urothelial microparticles.

2. Method according to claim 1 wherein the step b) comprises the detection of the product of transcription of said at least one specific marker of the urothelial cells and/or urothelial microparticles and of the product of transcription of said at least one marker of said pathology.

3. Method according to claim 1 wherein the step b) is implemented by means of a technique of amplification of nucleic acids chosen from the group comprising RT-PCR, quantitative PCR, final-point PCR, semi-quantitative PCR or their combination.

4. Method according to claim 1, wherein said pathology is a renal pathology chosen from the group comprising renal fibrosis, a phenotypic change of the renal epithelial cells, a transplant rejection, a cancer, the glomerular diseases, the tubular diseases, the interstitial diseases and the vascular kidney diseases.

5. Method according to claim 4, wherein said at least one specific genetic marker of said renal pathology is chosen from the group comprising the human genes CD45, CD68 and VIM as well as the genes having a sequence homology of at least 80%, preferably at least 85%, preferably at least 90%, preferably at least 95%, preferably at least 99% with these genes.

6. Method according to claim 1, wherein said pathology is a pathology modifying the quantity of cells and/or microparticles excreted in the urine.

7. Method according to claim 6, wherein said pathology modifying the quantity of cells and/or microparticles excreted in the urine is chosen from the group comprising segmentary and focal hyalinosis, acute tubular necrosis, epithelial phenotypic changes, acute transplant rejection, Sjögren's syndrome, sarcoidosis.

8. Method according to claim 1, wherein said at least one specific marker of urothelial cells and/or urothelial microparticles is chosen from the group comprising the human genes uroplakin 1A, uroplakin 1B, uroplakin 2, uroplakin 3A, uroplakin 3B, uroplakin 3BL, Bcas1, CEP152, CRABP2, DNASE1, KRT20, PLEKHF1, PLEKHG4B, RCN1, SEMA5B, SULT2A1, TFF1, VILL, ZNF720 as well as genes having a sequence homology of at least 80%, preferably at least 85%, preferably at least 90%, preferably at least 95%, preferably at least 99% with these genes.

9. Method according to claim 1, further comprising a step for comparing the threshold of expression of said marker of a normalized pathology with a threshold of gene expression, the expression of which is not modified by the disease.

10. In vitro diagnostic kit for the detection of a phenotypic change of the renal epithelial cells from a urine sample from a patient, comprising at least one pair of primers for the detection, in said sample, of at least one specific marker of a pathology chosen from the group comprising the human genes CD45, CD68 and VIM and at least one pair of primers for the detection of uroplakin 1A.

11. Use of the in vitro diagnostic kit according to claim 10 for the detection of a renal pathology, said renal pathology being epithelial phenotypic changes of the kidney.
